(19) United States
(12) Patent Application Publication
(10) Pub. No.: US 2022/0017634 A1
(43) Pub. Date: Jan. 20, 2022

(54) ENGINEERED BISPECIFIC PROTEINS

(71) Applicant: Denali Therapeutics Inc., South San Francisco, CA (US)

(72) Inventors: Gunasekaran Kannan, South San Francisco, CA (US); Do Jin Kim, South San Francisco, CA (US); Pascal Sanchez, South San Francisco, CA (US); Adam P. Silverman, South San Francisco, CA (US); Hai L. Tran, South San Francisco, CA (US)

(73) Assignee: Denali Therapeutics Inc., South San Francisco, CA (US)

(21) Appl. No.: 17/174,231

(22) Filed: Feb. 11, 2021

Related U.S. Application Data
(63) Continuation of application No. PCT/US2019/046705, filed on Aug. 15, 2019.
(60) Provisional application No. 62/765,095, filed on Aug. 16, 2018.

(51) Int. Cl. C07K 16/28; C07K 16/40; C07K 16/18

(52) U.S. Cl. CPC C07K 16/2881; C07K 16/40; C07K 16/18; C07K 2317/622; C07K 2317/55; C07K 2317/515; C07K 2317/526; C07K 2317/76; C07K 2317/94; C07K 2317/51

(57) ABSTRACT

In one aspect, bispecific proteins having the ability to specifically bind to two antigens, and having an Fc polypeptide that comprises a modified CH3 domain and specifically binds to a transferrin receptor, are provided.

### CROSS-REFERENCE TO RELATED APPLICATIONS

[0001] The present application is a continuation of International Application No. PCT/US2019/046705, filed Aug. 15, 2019, which claims priority to U.S. Provisional Patent Application No. 62/765,095, filed Aug. 16, 2018, the disclosures of which are incorporated herein by reference in their entirety for all purposes.

### SEQUENCE LISTING

[0002] The present application contains a Sequence Listing which has been submitted electronically in ASCII format and is hereby incorporated by reference in its entirety for all purposes. Said ASCII copy, created on Feb. 9, 2021, is named 102342-002210US-1235823_SL.txt and is 829,066 bytes in size.

### BACKGROUND

[0003] Transferrin receptor (TfR) is a carrier protein for transferrin that, among other functions, is needed for the import of iron into the cell and is regulated in response to intracellular iron concentration. Transferrin receptors are expressed on endothelia, including the endothelium of the blood-brain barrier, and are expressed at increased levels on various cancer cells and inflammatory cells. It is one of the receptors that mediates transcytosis of cognate ligands across the blood-brain barrier. Transferrin receptors can thus be desirable targets for introducing an agent into a cell for either endocytosis in the cell or transcytosis across the cell.

### BRIEF SUMMARY

[0004] In one aspect, bispecific proteins that contain a modified Fc polypeptide are provided. In some embodiments, a protein comprises:
[0005] (a) a first Fc polypeptide that is fused at the N-terminus to an Fd portion of a Fab that specifically binds to a first antigen;
[0006] (b) a second Fc polypeptide that is fused at the N-terminus to a single-chain variable fragment (scFv) that specifically binds to a second antigen, wherein the first and second Fc polypeptides form an Fc dimer; and
[0007] (c) a light chain polypeptide that pairs with the Fd portion to form the Fab that specifically binds to the first antigen;
[0008] wherein the first Fc polypeptide and/or the second Fc polypeptide comprises a modified CH2 domain or modified CH3 domain (e.g., any described herein) and specifically binds to a transferrin receptor.

[0009] In some embodiments, the first antigen and the second antigen are the same antigen. In some embodiments, the first antigen and the second antigen are different antigens.

[0010] In some embodiments, the second Fc polypeptide is fused to the scFv via a first linker. In some embodiments, the first linker has a length from 1 to 20 amino acids. In some embodiments, the first linker comprises a GGGGS (G₄S) linker, a GGGGSGGGGS ((G₄S)₂) linker, a GGGGSGGGGSGGGGS ((G₄S)₃) linker, or a GGGGSGGGGSGGGG ((G₄S)₂-G₄) linker.

[0011] In some embodiments, the scFv comprises a VL region and a VH region that are connected via a second linker, wherein the orientation of the scFv is VL region-second linker-VH region. In some embodiments, the scFv comprises a VL region and a VH region that are connected via a second linker, wherein the orientation of the scFv is VH region-second linker-VL region. In some embodiments, the second linker has a length from 10 to 25 amino acids. In some embodiments, the second linker comprises a (G₄S)₃ linker, a RTVAGGGGSGGGGS (RTVA(G₄S)₂) linker, a RTVAGGGGSGGGGSGGGGS (RTVA(G₄S)₃) linker, a ASTKGGGGSGGGGS (ASTK(G₄S)₂) linker, or a ASTKGGGGSGGGGSGGGGS (ASTK(G₄S)₃) linker. In some embodiments, the scFv comprises an interchain disulfide bridge. In some embodiments, the scFv comprises a cysteine at each of positions VH44 and VL100, according to Kabat variable domain numbering. In some embodiments, the scFv comprises a disulfide bond between the cysteines at positions VH44 and VL100.

[0012] In some embodiments, a protein comprises:
[0013] (a) a first polypeptide that is fused at the N-terminus to an Fd portion of a Fab that specifically binds to a first antigen, and is fused at the C-terminus to a heavy chain variable region or a light chain variable region of a Fab that specifically binds to a second antigen;
[0014] (b) a second Fc polypeptide that is fused at the N-terminus to an Fd portion of a Fab that specifically binds to a first antigen, and is fused at the C-terminus to the other of the first heavy chain variable region or first light chain variable region recited in (a),
[0015] wherein the heavy chain variable region and the light chain variable region together form an Fv fragment that specifically binds to the second antigen, and wherein the first and second Fc polypeptides form an Fc dimer; and
[0016] (c) a light chain polypeptide that pairs with each of the Fd portions recited in (a) and (b) to form a Fab that specifically binds to the first antigen;
[0017] wherein the first Fc polypeptide and/or the second Fc polypeptide comprises a modified CH2 domain or modified CH3 domain (e.g., any described herein) and specifically binds to a transferrin receptor.

[0018] In some embodiments, the first antigen and the second antigen are the same antigen. In some embodiments, the first antigen and the second antigen are different antigens.

[0019] In some embodiments, the first Fc polypeptide is fused to the heavy chain variable region of the Fv fragment and the second Fc polypeptide is fused to the light chain variable region of the Fv fragment. In some embodiments, the first Fc polypeptide is fused to the light chain variable region of the Fv fragment and the second Fc polypeptide is fused to the heavy chain variable region of the Fv fragment. In some embodiments, the Fd portions recited in (a) and (b) comprise identical sequences. In some embodiments, the first Fc polypeptide and/or the second Fc polypeptide is fused at the C-terminus to the heavy chain variable region or light chain variable region via a first linker. In some embodiments, the first linker has a length from 1 to 20 amino acids. In some embodiments, the first linker comprises a G₄S linker, a (G₄S)₂ linker, a (G₄S)₃ linker, or a (G₄S)₂-G₄ linker.

[0020] In some embodiments, a protein comprises:
[0021] (a) a first Fc polypeptide that is fused at the N-terminus to an Fd portion of a Fab that specifically binds to a first antigen;
[0022] (b) a second Fc polypeptide that is fused at the N-terminus to an Fd portion of a Fab that specifically binds to a first antigen, and wherein the first and second Fc polypeptides form an Fc dimer; and
[0023] (c) a light chain polypeptide that pairs with each of the Fd portions recited in (a) and (b) to form a Fab that specifically binds to the first antigen;
[0024] wherein the first Fc polypeptide and/or the second Fc polypeptide is fused at the C-terminus to an scFv that specifically binds to a second antigen; and
[0025] wherein the first Fc polypeptide and/or the second Fc polypeptide comprises a modified CH2 domain or modified CH3 domain (e.g., any described herein) and specifically binds to a transferrin receptor.

[0026] In some embodiments, the first antigen and the second antigen are the same antigen. In some embodiments, the first antigen and the second antigen are different antigens.

[0027] In some embodiments, the first Fc polypeptide is fused at the C-terminus to an scFv that specifically binds to the second antigen. In some embodiments, the second Fc polypeptide is fused at the C-terminus to an scFv that specifically binds to the second antigen. In some embodiments, each of the first Fc polypeptide and the second Fc polypeptide is fused at the C-terminus to an scFv that specifically binds to the second antigen. In some embodiments, the scFvs that are fused to the first Fc polypeptide and the second Fc polypeptide comprise identical sequences. In some embodiments, the first Fc polypeptide and/or the second Fc polypeptide is fused to the scFv via a first linker. In some embodiments, the first linker has a length from 1 to 20 amino acids. In some embodiments, the first linker comprises a G₄S linker, a (G₄S)₂ linker, a (G₄S)₃ linker, or a (G₄S)₂-G₄ linker.

[0028] In some embodiments, the scFv comprises a VL region and a VH region that are connected via a second linker, wherein the orientation of the scFv is VL region-second linker-VH region. In some embodiments, the scFv comprises a VL region and a VH region that are connected via a second linker, wherein the orientation of the scFv is VH region-second linker-VL region. In some embodiments, the second linker has a length from 10 to 25 amino acids. In some embodiments, the second linker comprises a (G₄S)₃ linker, an RTVA(G₄S)₂ linker, a RTVA(G₄S)₃ linker, an ASTK(G₄S)₂ linker, or a ASTK(G₄S)₃ linker. In some embodiments, the scFv comprises an interchain disulfide bridge. In some embodiments, the scFv comprises a cysteine at each of positions VH44 and VL100, according to Kabat variable domain numbering. In some embodiments, the scFv comprises a disulfide bond between the cysteines at positions VH44 and VL100. In some embodiments, the Fd portions recited in (a) and (b) comprise identical sequences.

[0029] In some embodiments, a protein as described herein comprises a first Fc polypeptide that comprises a modified CH3 domain and specifically binds to a transferrin receptor. In some embodiments, a protein as described herein comprises a second Fc polypeptide that comprises a modified CH3 domain and specifically binds to a transferrin receptor. In some embodiments, both the first Fc polypeptide and the second Fc polypeptide comprise a modified CH3 domain and specifically bind to a transferrin receptor.

[0030] In some embodiments, the first Fc polypeptide and/or the second Fc polypeptide comprises a modified CH3 domain that comprises one, two, three, four, five, six, seven, eight, nine, ten, or eleven substitutions in a set of amino acid positions comprising 380, 384, 386, 387, 388, 389, 390, 413, 415, 416, and 421, according to EU numbering. In some embodiments, the modified CH3 domain comprises Glu, Leu, Ser, Val, Trp, Tyr, or Gln at position 380; Leu, Tyr, Phe, Trp, Met, Pro, or Val at position 384; Leu, Thr, His, Pro, Asn, Val, or Phe at position 386; Val, Pro, Ile, or an acidic amino acid at position 387; Trp at position 388; an aliphatic amino acid, Gly, Ser, Thr, or Asn at position 389; Gly, His, Gln, Leu, Lys, Val, Phe, Ser, Ala, Asp, Glu, Asn, Arg, or Thr at position 390; an acidic amino acid, Ala, Ser, Leu, Thr, Pro, Ile, or His at position 413; Glu, Ser, Asp, Gly, Thr, Pro, Gln, or Arg at position 415; Thr, Arg, Asn, or an acidic amino acid at position 416; and/or an aromatic amino acid, His, or Lys at position 421, according to EU numbering.

[0031] In some embodiments, the first Fc polypeptide and/or the second Fc polypeptide comprises at least two substitutions at positions selected from the group consisting of 384, 386, 387, 388, 389, 390, 413, 416, and 421, according to EU numbering. In some embodiments, the first Fc polypeptide and/or the second Fc polypeptide includes substitutions for at least three, four, five, six, seven, eight, or nine of the positions. In some embodiments, the first Fc polypeptide and/or the second Fc polypeptide further comprises one, two, three, or four substitutions at positions comprising 380, 391, 392, and 415, according to EU numbering.

[0032] In some embodiments, the first Fc polypeptide and/or the second Fc polypeptide further comprises one, two, or three substitutions at positions comprising 414, 424, and 426, according to EU numbering.

[0033] In some embodiments, the first Fc polypeptide and/or the second Fc polypeptide comprises Trp at position 388.

[0034] In some embodiments, the first Fc polypeptide and/or the second Fc polypeptide comprises an aromatic amino acid at position 421. In some embodiments, the aromatic amino acid at position 421 is Trp or Phe.

[0035] In some embodiments, the first Fc polypeptide and/or the second Fc polypeptide comprises at least one position selected from the following: position 380 is Trp, Leu, or Glu; position 384 is Tyr or Phe; position 386 is Thr; position 387 is Glu; position 388 is Trp; position 389 is Ser, Ala, Val, or Asn; position 390 is Ser or Asn; position 413 is Thr or Ser; position 415 is Glu or Ser; position 416 is Glu; and position 421 is Phe. In some embodiments, the first Fc polypeptide and/or the second Fc polypeptide comprises 2, 3, 4, 5, 6, 7, 8, 9, 10, or 11 positions selected from the following: position 380 is Trp, Leu, or Glu; position 384 is Tyr or Phe; position 386 is Thr; position 387 is Glu; position 388 is Trp; position 389 is Ser, Ala, Val, or Asn; position 390 is Ser or Asn; position 413 is Thr or Ser; position 415 is Glu or Ser; position 416 is Glu; and position 421 is Phe. In some embodiments, the first Fc polypeptide and/or the second Fc polypeptide comprises 11 positions as follows: position 380 is Trp, Leu, or Glu; position 384 is Tyr or Phe; position 386 is Thr; position 387 is Glu; position 388 is Trp; position 389 is Ser, Ala, Val, or Asn; position 390 is Ser or Asn; position 413 is Thr or Ser; position 415 is Glu or Ser; position 416 is Glu; and position 421 is Phe.

[0036] In some embodiments, the first Fc polypeptide and/or the second Fc polypeptide has a CH3 domain with at least 85% identity, at least 90% identity, or at least 95% identity to amino acids 111-217 of any one of SEQ ID NOs: 4-29, 101-164, and 239-252. In some embodiments, the first Fc polypeptide and/or the second Fc polypeptide comprises the amino acid sequence of any one of SEQ ID NOs:4-29, 101-164, and 239-252. In some embodiments, the residues for at least 5, 6, 7, 8, 9, 10, 11, 12, 13, 14, 15, or 16 of the positions corresponding to EU index positions 380, 384, 386, 387, 388, 389, 390, 391, 392, 413, 414, 415, 416, 421, 424 and 426 of any one of SEQ ID NOs:4-29, 101-164, and 239-252 are not deleted or substituted.

[0037] In some embodiments, the first Fc polypeptide and/or the second Fc polypeptide binds to the apical domain of the transferrin receptor. In some embodiments, the binding of the protein to the transferrin receptor does not substantially inhibit binding of transferrin to the transferrin receptor.

[0038] In some embodiments, the first Fc polypeptide and the second Fc polypeptide each contain one or more modifications that promote heterodimerization. In some embodiments, one of the Fc polypeptides has a T366W substitution and other Fc polypeptide has T366S, L368A, and Y407V substitutions, according to EU numbering. In some embodiments, the first Fc polypeptide contains the T366S, L368A, and Y407V substitutions and the second Fc polypeptide contains the T366W substitution. In some embodiments, the first Fc polypeptide contains the T366W substitution and the second Fc polypeptide contains the T366S, L368A, and Y407V substitutions.

[0039] In some embodiments, the first Fc polypeptide and/or the second Fc polypeptide comprises a native FcRn binding site. In some embodiments, the first Fc polypeptide and/or the second Fc polypeptide comprises a modification that alters FcRn binding. In some embodiments, the first Fc polypeptide and/or the second Fc polypeptide comprises one or more modifications that reduce effector function. In some embodiments, the modifications that reduce effector function are substitutions of Ala at position 234 and Ala at position 235, according to EU numbering. In some embodiments, both the first Fc polypeptide and the second Fc polypeptide comprise L234A and L235A substitutions.

[0040] In some embodiments, the first Fc polypeptide and/or the second Fc polypeptide comprises modifications relative to the native Fc sequence that extend serum half-life. In some embodiments, the modifications comprise substitutions of Tyr at position 252, Thr at position 254, and Glu at position 256, according to EU numbering. In some embodiments, the modifications comprise substitutions of Leu at position 428 and Ser at position 434, according to EU numbering. In some embodiments, the modifications comprise a substitution of Ser or Ala at position 434, according to EU numbering. In some embodiments, the first Fc polypeptide and/or the second Fc polypeptide comprises M428L and N434 S substitutions.

[0041] In some embodiments, the first Fc polypeptide and the second Fc polypeptide do not have effector function.

[0042] In some embodiments, the first Fc polypeptide and/or the second Fc polypeptide has an amino acid sequence identity of at least 75%, or at least 80%, 90%, 92%, or 95%, as compared to a corresponding wild-type Fc polypeptide. In some embodiments, the corresponding wild-type Fc polypeptide is a human IgG1, IgG2, IgG3, or IgG4 Fc polypeptide. In some embodiments, the first Fc polypeptide and/or and the second Fc polypeptide comprises an amino acid sequence of any one of SEQ ID NOs:165-238, 253-370, and 377-388.

[0043] In another aspect, pharmaceutical compositions are provided. In some embodiments, a pharmaceutical composition comprises a protein as disclosed herein and a pharmaceutically acceptable carrier.

[0044] In still another aspect, isolated polynucleotides are provided. In some embodiments, a polynucleotide comprises a nucleotide sequence encoding a protein as disclosed herein.

[0045] In yet another aspect, vectors and host cells are provided. In some embodiments, a vector comprises a polynucleotide comprises a nucleotide sequence encoding a protein as disclosed herein. In some embodiments, a host cell comprises a polynucleotide comprises a nucleotide sequence encoding a protein as disclosed herein.

[0046] In still another aspect, methods of treating a subject are provided. In some embodiments, the method comprises administering to the subject a protein or pharmaceutical composition as disclosed herein.

[0047] In another aspect, the present disclosure provides a non-human transgenic animal (e.g., a mammal) comprising (a) a nucleic acid that encodes a chimeric TfR polypeptide comprising: (i) an apical domain having at least 90% identity to SEQ ID NO:392 and (ii) the transferrin binding site of the native TfR polypeptide of the animal, and (b) a transgene of a mutant microtubule associated protein Tau (MAPT) gene, wherein the chimeric TfR polypeptide and/or the Tau protein is expressed in the brain of the animal.

[0048] In some embodiments, the apical domain comprises the amino acid sequence of SEQ ID NO:392. In some embodiments, the apical domain comprises the amino acid sequence of SEQ ID NO:393, SEQ ID NO:394, or SEQ ID NO:395.

[0049] In some embodiments, the chimeric TfR polypeptide comprises an amino acid sequence having at least 95% identity to SEQ ID NO:396.

[0050] In some embodiments, the animal expresses a level of the chimeric TfR polypeptide in brain, liver, kidney, or lung tissue within 20% (e.g., 18%, 16%, 14%, 12%, 10%, 8%, 6%, or 4%) of the level of expression of TfR in the same tissue of a corresponding wild-type animal of the same species.

[0051] In some embodiments, the animal comprises a red blood cell count, level of hemoglobin, or level of hematocrit within 20% (e.g., 18%, 16%, 14%, 12%, 10%, 8%, 6%, or 4%) of the red blood cell count, level of hemoglobin, or level of hematocrit in a corresponding wild-type animal of the same species.

[0052] In some embodiments, the nucleic acid sequence encoding the apical domain comprises a nucleic acid sequence having at least 95% (e.g., 97%. 98%, or 99%) identity to SEQ ID NO:397.

[0053] In some embodiments, the animal is homozygous or heterozygous for the nucleic acid encoding the chimeric TfR polypeptide.

[0054] In some embodiments, the nucleic acid that encodes the chimeric TfR polypeptide replaces the nucleic acid encoding the endogenous TfR polypeptide in the genome of the aminal, e.g., at the endogenous locus.

[0055] In some embodiments, the mutant MAPT gene encodes a mutant human Tau protein.

[0056] In some embodiments, the mutant human Tau protein comprises the amino acid substitution P272S relative to the sequence of SEQ ID NO:398.

[0057] In some embodiments, the animal is a rodent, such as a mouse or a rat.

### BRIEF DESCRIPTION OF THE DRAWINGS

[0058] FIG. 1. Exemplary engineered TfR-binding Fc polypeptide asymmetrically fused at the N-termini to a Fab and an scFv via flexible linkers. As shown, the Fab is fused to the knob half, which also comprises the TfR-binding mutations while the scFv is fused to the hole half, though the opposite orientation is possible.

[0059] FIG. 2. Exemplary engineered TfR-binding Fc polypeptide fused with N-terminal Fabs and variable domains fused to the C-termini of each Fc half via flexible linkers. As shown, VL is fused to the knob half, which also comprises the TfR-binding mutations while VH is fused to the hole half, though the opposite orientation is possible.

[0060] FIGS. 3A and 3B. Exemplary engineered TfR-binding Fc polypeptide fused with with N-terminal Fabs and a C-terminal scFv via a flexible linker. (A) Format where the scFv is fused to the hole half, whereas the knob half comprises the TfR-binding mutations, though the scFv could also be fused to the knob. (B) Format where an scFv is fused to each of the knob and hole C-termini.

[0061] FIGS. 4A-4F. Pharmacokinetic properties in mice of BACE1/Tau bispecific proteins comprising TfR-binding Fc polypeptides. BACE1/Tau bispecific proteins comprising TfR-binding Fc polypeptides and an anti-BACE1 control (Ab153) were dosed at 10 mg/kg in wild-type mice and their levels were monitored in plasma over 7 days. (A-B) Fc capture and detection were used to quantify the levels of antibodies in plasma (A) and the clearance value (CL) for each molecule was calculated (B). (D-F) To determine whether the BACE1 scFv and C-terminal Fv's remain intact in vivo, BACE1 (C) and Tau (E) affinity capture with Fc detection was used. Strong correlations between both the BACE1 (D) and Tau (F) antigen capture with the Fc detection indicated that the molecules are largely intact throughout the pharmacokinetic time course.

[0062] FIGS. 5A and 5B. Pharmacokinetic properties in mice of additional BACE1/Tau bispecific proteins comprising TfR-binding Fc polypeptides. BACE1/Tau bispecific proteins comprising TfR-binding Fc polypeptides and an anti-RSV negative control antibody (Ab122) were dosed at 10 mg/kg in wild-type mice and their levels were monitored in plasma over 7 days. Fc capture and detection were used to quantify the levels of antibodies in plasma (A) and the clearance value (CL) for each molecule was calculated (B). All BACE1/Tau bispecific proteins comprising TfR-binding Fc polypeptides had acceptable clearance values within 1.5-2 fold of the control antibody and within 1.5 fold of a control anti-Tau antibody comprising a TfR-binding Fc polypeptide.

[0063] FIGS. 6A and 6B. Pharmacokinetic properties of additional BACE1/Tau bispecific proteins comprising TfR-binding Fc polypeptides in human TfR knock-in (hTfR^{ms/hu} KI) mice. BACE1/Tau bispecific proteins comprising TfR-binding Fc polypeptides and an anti-RSV negative control antibody (Ab122) were dosed at 10 mg/kg in hTfR^{ms/hu} KI mice and their levels were monitored in plasma over 7 days. Fc capture and detection were used to quantify the levels of antibodies in plasma (A) and the clearance value (CL) for each molecule was calculated (B). All bispecific proteins exhibited faster clearance than control Ab122 or 1C7 due to TfR binding and target-mediated clearance. BACE1/Tau bispecific proteins comprising TfR-binding Fc polypeptides all had acceptable clearance values within 2-fold of a control anti-Tau antibody comprising a TfR-binding Fc polypeptide.

[0064] FIGS. 7A-7I. Pharmacokinetic properties of additional BACE1/Tau bispecific proteins comprising TfR-binding Fc polypeptides in PS19/hTfR^{ms/hu} KI mice. (A and B) Plasma and brain huIgG1 concentrations of constructs 28, 46, and 62 in PS19/TfR^{ms/hu} KI mice at various time points following a single 50 mg/kg intravenous injection of the indicated molecules. The missing points for later timepoints for certain molecules are due to values below the lower limit of quantification. (C) Brain-to-plasma ratios of constructs 28, 46, and 62 at 24 hrs post-dose and clearance values from data in (A) and (B). (D) Plasma huIgG1 concentrations of constructs 62 and 75-77. (E) Plasma clearance values of constructs 62 and 75-77 from data in (D). (F) Brain huIgG1 concentrations of constructs 62 and 75-77. (G) Brain huIgG1 concentrations of constructs 62 and 75-77 from data in (F). (H and I) Brain-to-plasma ratios of constructs 62 and 75-77 1 day post-dose in PS19/TfR^{ms/hu} KI mice following a single 50 mg/kg intravenous injection of the indicated molecules. All graphs represent mean±SEM, n=5 mice per group.

[0065] FIGS. 8A and 8B. Alternate architectures of BACE1/Tau bispecific proteins comprising TfR-binding Fc polypeptides reduce Aβ in a cell-based assay. (A) Human Aβ 40 was measured from media of CHO cells stably overexpressing human APP treated with the indicated antibodies for 24 hours. Incubation with all versions of 2H8 fused to Clone35.23.4:1C7-1C7 reduced human Aβ in a dose-dependent manner as compared to untreated control. Control IgG (Ab122) had no effect on Aβ reduction. Line graphs represent mean±SEM, n=2 independent experiments. (B) Cellular IC50 and maximum percent Aβ reduction compared to untreated controls from experiment in (A).

[0066] FIGS. 9A-9E. Quantification of Aβ40 in PS19/hTfR^{ms/hu} KI mice. (A and B) Brain and CSF Aβ40 of constructs 28, 46, and 62 in PS19/TfR^{ms/hu} KI mice at various time points following a single 50 mg/kg intravenous injection of the indicated molecules. (C) Maximum Aβ40 concentrations in CSF and brain from experiments in (A) and (B). (D) Brain Aβ40 of constructs 62 and 75-77 in PS19/TfR^{ms/hu} KI mice. (E) Percentage of brain Aβ40 reduction of constructs 62 and 75-77. All graphs represent mean±SEM, n=5 mice per group.

### DETAILED DESCRIPTION

### I. Introduction

[0067] We have developed several bispecific protein formats that contain a modified Fc polypeptide into which a non-endogenous TfR binding site has been engineered. As described herein, we have discovered that certain amino acids in an Fc region can be modified to generate a novel binding site specific for TfR in the Fc polypeptide. Taking advantage of the fact that TfR is highly-expressed on the blood-brain barrier (BBB) and that TfR naturally moves transferrin from the blood into the brain, modification of an Fc polypeptide to include a TfR binding site can promote the transport of the bispecific proteins across the BBB. This approach can substantially improve brain uptake of the bispecific proteins that specifically bind to two antigens, and is therefore highly useful for treating disorders and diseases where brain delivery is advantageous. In one example, bispecific proteins having the ability to specifically bind to two antigens, and having an Fc polypeptide that comprises a modified CH3 domain and specifically binds to a transferrin receptor, are provided.

[0068] As disclosed herein, the bispecific proteins described herein generally can be generated in a single cell without light chain mispairing or steering. These formats also allow for having the protein bind either target monovalently or bivalently. In some embodiments, the bispecific proteins bind to each target antigen monovalently. In some embodiments, the bispecific proteins bind to one target antigen monovalently and the other target antigen bivalently. In some embodiments, the bispecific proteins bind to each target antigen bivalently. In some embodiments, the first antigen and the second antigen are the same antigen. In some embodiments, the first antigen and the second antigen are different antigens.

### II. Definitions

[0069] As used herein, the singular forms “a,” “an,” and “the” include plural referents unless the content clearly dictates otherwise. Thus, for example, reference to “an antibody” optionally includes a combination of two or more such molecules, and the like.

[0070] As used herein, the terms “about” and “approximately,” when used to modify an amount specified in a numeric value or range indicate that the numeric value as well as reasonable deviations from the value known to the skilled person in the art, for example ±20%, ±10%, or ±5%, are within the intended meaning of the recited value.

[0071] As used herein, the term “antibody” refers to a protein with an immunoglobulin fold that specifically binds to an antigen via its variable regions. The term encompasses intact polyclonal antibodies, intact monoclonal antibodies, single chain antibodies, multi specific antibodies such as bispecific antibodies, monospecific antibodies, monovalent antibodies, chimeric antibodies, humanized antibodies, and human antibodies. The term “antibody,” as used herein, also includes antibody fragments that retain antigen-binding specificity, including but not limited to Fab, F(ab′)₂, Fv, scFv, and bivalent scFv. Antibodies can contain light chains that are classified as either kappa or lambda. Antibodies can contain heavy chains that are classified as gamma, mu, alpha, delta, or epsilon, which in turn define the immunoglobulin classes, IgG, IgM, IgA, IgD and IgE, respectively.

[0072] An exemplary immunoglobulin (antibody) structural unit comprises a tetramer. Each tetramer is composed of two identical pairs of polypeptide chains, each pair having one “light” (about 25 kD) and one “heavy” chain (about 50-70 kD). The N-terminus of each chain defines a variable region of about 100 to 110 or more amino acids primarily responsible for antigen recognition. The terms “variable light chain” (VL) and “variable heavy chain” (VH) refer to these light and heavy chains, respectively.

[0073] The term “variable region” or “variable domain” refers to a domain in an antibody heavy chain or light chain that is derived from a germline Variable (V) gene, Diversity (D) gene, or Joining (J) gene (and not derived from a Constant (Cμ and Cδ) gene segment), and that gives an antibody its specificity for binding to an antigen. Typically, an antibody variable region comprises four conserved “framework” regions interspersed with three hypervariable “complementarity determining regions.”

[0074] The term “complementarity determining region” or “CDR” refers to the three hypervariable regions in each chain that interrupt the four framework regions established by the light and heavy chain variable regions. The CDRs are primarily responsible for antibody binding to an epitope of an antigen. The CDRs of each chain are typically referred to as CDR1, CDR2, and CDR3, numbered sequentially starting from the N-terminus, and are also typically identified by the chain in which the particular CDR is located. Thus, a VH CDR3 or CDR-H3 is located in the variable region of the heavy chain of the antibody in which it is found, whereas a VL CDR1 or CDR-L1 is the CDR1 from the variable region of the light chain of the antibody in which it is found.

[0075] The “framework regions” or “FRs” of different light or heavy chains are relatively conserved within a species. The framework region of an antibody, that is the combined framework regions of the constituent light and heavy chains, serves to position and align the CDRs in three-dimensional space. Framework sequences can be obtained from public DNA databases or published references that include germline antibody gene sequences. For example, germline DNA sequences for human heavy and light chain variable region genes can be found in the “VBASE2” germline variable gene sequence database for human and mouse sequences.

[0076] The amino acid sequences of the CDRs and framework regions can be determined using various well known definitions in the art, e.g., Kabat, Chothia, international ImMunoGeneTics database (IMGT), AbM, and observed antigen contacts (“Contact”). In some embodiments, CDRs are determined according to the Contact definition. See, MacCallum et al., J. Mol. Biol., 262:732-745 (1996). In some embodiments, CDRs are determined by a combination of Kabat, Chothia, and/or Contact CDR definitions.

[0077] The term “Fd portion” refers to an N-terminal portion of an immunoglobulin heavy chain. Typically, an Fd portion includes the heavy chain variable (VH) region and a heavy chain constant (CH1) region.

[0078] The term “Fab” refers to an antigen-binding fragment consisting of a light chain variable region, a light chain constant region, a heavy chain variable region, and a heavy chain CH1 constant region.

[0079] The term “single-chain variable fragment” or “scFv” refers to an antigen-binding fragment consisting of a heavy chain variable region and a light chain variable region linked together via a peptide linker. An scFv lacks constant regions.

[0080] The term “Fv fragment” refers to an antigen-binding fragment consisting of a heavy chain variable region and a light chain variable region that together form a binding site for an antigen.

[0081] The term “epitope” refers to the area or region of an antigen to which a molecule, e.g., the CDRs of an antibody, specifically binds and can include a few amino acids or portions of a few amino acids, e.g., 5 or 6, or more, e.g., 20 or more amino acids, or portions of those amino acids. In some cases, the epitope includes non-protein components, e.g., from a carbohydrate, nucleic acid, or lipid. In some cases, the epitope is a three-dimensional moiety. Thus, for example, where the target is a protein, the epitope can be comprised of consecutive amino acids (e.g., a linear epitope), or amino acids from different parts of the protein that are brought into proximity by protein folding (e.g., a discontinuous or conformational epitope).

[0082] As used herein, the phrase “recognizes an epitope,” as used with reference to an antibody, means that the antibody CDRs interact with or specifically bind to the antigen at that epitope or a portion of the antigen containing that epitope.

[0083] A “humanized antibody” is a chimeric immunoglobulin derived from a non-human source (e.g., murine) that contains minimal sequences derived from the non-human immunoglobulin outside the CDRs. In general, a humanized antibody will comprise at least one (e.g., two) variable domain(s), in which the CDR regions substantially correspond to those of the non-human immunoglobulin and the framework regions substantially correspond to those of a human immunoglobulin sequence. In some instances, certain framework region residues of a human immunoglobulin can be replaced with the corresponding residues from a non-human species to, e.g., improve specificity, affinity, and/or serum half-life. The humanized antibody can also comprise at least a portion of an immunoglobulin constant region (Fc), typically that of a human immunoglobulin sequence. Methods of antibody humanization are known in the art.

[0084] A “human antibody” or a “fully human antibody” is an antibody having human heavy chain and light chain sequences, typically derived from human germline genes. In some embodiments, the antibody is produced by a human cell, by a non-human animal that utilizes human antibody repertoires (e.g., transgenic mice that are genetically engineered to express human antibody sequences), or by phage display platforms.

[0085] The term “specifically binds” refers to a molecule (e.g., a Fab, an scFv, or a modified Fc polypeptide (or a target-binding portion thereof) that binds to an epitope or target with greater affinity, greater avidity, and/or greater duration to that epitope or target in a sample than it binds to another epitope or non-target compound (e.g., a structurally different antigen). In some embodiments, a Fab, scFv, or modified Fc polypeptide (or a target-binding portion thereof) that specifically binds to an epitope or target is a Fab, scFv, or modified Fc polypeptide (or a target-binding portion thereof) that binds to the epitope or target with at least 5-fold greater affinity than other epitopes or non-target compounds, e.g., at least 6-fold, 7-fold, 8-fold, 9-fold, 10-fold, 25-fold, 50-fold, 100-fold, 1000-fold, 10,000-fold, or greater affinity. The term “specific binding,” “specifically binds to,” or “is specific for” a particular epitope or target, as used herein, can be exhibited, for example, by a molecule having an equilibrium dissociation constant K_{D} for the epitope or target to which it binds of, e.g., 10⁻⁴ M or smaller, e.g., 10⁻⁵M, 10⁻⁶ M, 10⁻⁷ M, 10⁻⁸ M, 10⁻⁹ M, 10⁻¹⁰M, 10⁻¹¹ M, or 10⁻¹²M. It will be recognized by one of skill that a Fab or scFv that specifically binds to a target from one species may also specifically bind to orthologs of that target.

[0086] The term “binding affinity” is used herein to refer to the strength of a non-covalent interaction between two molecules, e.g., between a Fab or scFv and an antigen, or between a modified Fc polypeptide (or a target-binding portion thereof) and a target. Thus, for example, the term may refer to 1:1 interactions between a Fab or scFv and an antigen or between a modified Fc polypeptide (or a target-binding portion thereof) and a target, unless otherwise indicated or clear from context. Binding affinity may be quantified by measuring an equilibrium dissociation constant (K_{D}), which refers to the dissociation rate constant (k_{d}, time⁻¹) divided by the association rate constant (kₐ, time⁻¹ M⁻¹). K_{D} can be determined by measurement of the kinetics of complex formation and dissociation, e.g., using Surface Plasmon Resonance (SPR) methods, e.g., a Biacore™ system; kinetic exclusion assays such as KinExA®; and BioLayer interferometry (e.g., using the ForteBio® Octet platform). As used herein, “binding affinity” includes not only formal binding affinities, such as those reflecting 1:1 interactions between a Fab or scFv and an antigen or between a modified Fc polypeptide (or a target-binding portion thereof) and a target, but also apparent affinities for which K_{D}'s are calculated that may reflect avid binding.

[0087] A “transferrin receptor” or “TfR,” as used herein, refers to transferrin receptor protein 1. The human transferrin receptor 1 polypeptide sequence is set forth in SEQ ID NO:100. Transferrin receptor protein 1 sequences from other species are also known (e.g., chimpanzee, accession number XP 003310238.1; rhesus monkey, NP 001244232.1; dog, NP 001003111.1; cattle, NP 001193506.1; mouse, NP 035768.1; rat, NP 073203.1; and chicken, NP 990587.1). The term “transferrin receptor” also encompasses allelic variants of exemplary reference sequences, e.g., human sequences, that are encoded by a gene at a transferrin receptor protein 1 chromosomal locus. Full-length transferrin receptor protein includes a short N-terminal intracellular region, a transmembrane region, and a large extracellular domain. The extracellular domain is characterized by three domains: a protease-like domain, a helical domain, and an apical domain.

[0088] As used herein, the term “Fc polypeptide” refers to the C-terminal region of a naturally occurring immunoglobulin heavy chain polypeptide that is characterized by an Ig fold as a structural domain. An Fc polypeptide contains constant region sequences including at least the CH2 domain and/or the CH3 domain and may contain at least part of the hinge region, but does not contain a variable region.

[0089] A “modified Fc polypeptide” refers to an Fc polypeptide that has at least one mutation, e.g., a substitution, deletion or insertion, as compared to a wild-type immunoglobulin heavy chain Fc polypeptide sequence, but retains the overall Ig fold or structure of the native Fc polypeptide.

[0090] As used herein, “FcRn” refers to the neonatal Fc receptor. Binding of Fc polypeptides to FcRn reduces clearance and increases serum half-life of the Fc polypeptide. The human FcRn protein is a heterodimer that is composed of a protein of about 50 kDa in size that is similar to a major histocompatibility (WIC) class I protein and a β2-microglobulin of about 15 kDa in size.

[0091] As used herein, an “FcRn binding site” refers to the region of an Fc polypeptide that binds to FcRn. In human IgG, the FcRn binding site, as numbered using the EU index, includes L251, M252, 1253, 5254, R255, T256, M428, H433, N434, H435, and Y436. These positions correspond to positions 21 to 26, 198, and 203 to 206 of SEQ ID NO:1.

[0092] As used herein, a “native FcRn binding site” refers to a region of an Fc polypeptide that binds to FcRn and that has the same amino acid sequence as the region of a naturally occurring Fc polypeptide that binds to FcRn.

[0093] As used herein, the terms “CH3 domain” and “CH2 domain” refer to immunoglobulin constant region domain polypeptides. For purposes of this application, a CH3 domain polypeptide refers to the segment of amino acids from about position 341 to about position 447 as numbered according to the EU numbering scheme, and a CH2 domain polypeptide refers to the segment of amino acids from about position 231 to about position 340 as numbered according to the EU numbering scheme and does not include hinge region sequences. CH2 and CH3 domain polypeptides may also be numbered by the IMGT (ImMunoGeneTics) numbering scheme in which the CH2 domain numbering is 1-110 and the CH3 domain numbering is 1-107, according to the IMGT Scientific chart numbering website). CH2 and CH3 domains are part of the Fc region of an immunoglobulin. An Fc region refers to the segment of amino acids from about position 231 to about position 447 as numbered according to the EU numbering scheme, but as used herein, can include at least a part of a hinge region of an antibody. An illustrative hinge region sequence is the human IgG1 hinge sequence EPKSCDKTHTCPPCP (SEQ ID NO:376).

[0094] The terms “wild-type,” “native,” and “naturally occurring,” as used with reference to a CH3 or CH2 domain, refer to a domain that has a sequence that occurs in nature.

[0095] As used herein, the term “mutant,” as used with reference to a mutant polypeptide or mutant polynucleotide is used interchangeably with “variant.” A variant with respect to a given wild-type CH3 or CH2 domain reference sequence can include naturally occurring allelic variants. A “non-naturally” occurring CH3 or CH2 domain refers to a variant or mutant domain that is not present in a cell in nature and that is produced by genetic modification, e.g., using genetic engineering technology or mutagenesis techniques, of a native CH3 domain or CH2 domain polynucleotide or polypeptide. A “variant” includes any domain comprising at least one amino acid mutation with respect to wild-type. Mutations may include substitutions, insertions, and deletions.

[0096] The term “isolated,” as used with reference to a nucleic acid or protein, denotes that the nucleic acid or protein is essentially free of other cellular components with which it is associated in the natural state. It is preferably in a homogeneous state. Purity and homogeneity are typically determined using analytical chemistry techniques such as electrophoresis (e.g., polyacrylamide gel electrophoresis) or chromatography (e.g., high performance liquid chromatography). In some embodiments, an isolated nucleic acid or protein is at least 85% pure, at least 90% pure, at least 95% pure, or at least 99% pure.

[0097] The term “amino acid” refers to naturally occurring and synthetic amino acids, as well as amino acid analogs and amino acid mimetics that function in a manner similar to the naturally occurring amino acids. Naturally occurring are those encoded by the genetic code, as well as those amino acids that are later modified, e.g., hydroxyproline, γ-carboxyglutamate and O-phosphoserine. Naturally occurring α-amino acids include, without limitation, alanine (Ala), cysteine (Cys), aspartic acid (Asp), glutamic acid (Glu), phenylalanine (Phe), glycine (Gly), histidine (His), isoleucine (Ile), arginine (Arg), lysine (Lys), leucine (Leu), methionine (Met), asparagine (Asn), proline (Pro), glutamine (Gln), serine (Ser), threonine (Thr), valine (Val), tryptophan (Trp), tyrosine (Tyr), and combinations thereof. Stereoisomers of a naturally occurring α-amino acids include, without limitation, D-alanine (D-Ala), D-cysteine (D-Cys), D-aspartic acid (D-Asp), D-glutamic acid (D-Glu), D-phenylalanine (D-Phe), D-histidine (D-His), D-isoleucine (D-Ile), D-arginine (D-Arg), D-lysine (D-Lys), D-leucine (D-Leu), D-methionine (D-Met), D-asparagine (D-Asn), D-proline (D-Pro), D-glutamine (D-Gln), D-serine (D-Ser), D-threonine (D-Thr), D-valine (D-Val), D-tryptophan (D-Trp), D-tyrosine (D-Tyr), and combinations thereof. “Amino acid analogs” refers to compounds that have the same basic chemical structure as a naturally occurring amino acid, i.e., an a carbon that is bound to a hydrogen, a carboxyl group, an amino group, and an R group, e.g., homoserine, norleucine, methionine sulfoxide, methionine methyl sulfonium. Such analogs have modified R groups (e.g., norleucine) or modified peptide backbones, but retain the same basic chemical structure as a naturally occurring amino acid. “Amino acid mimetics” refers to chemical compounds that have a structure that is different from the general chemical structure of an amino acid, but that functions in a manner similar to a naturally occurring amino acid. Amino acids may be referred to herein by either their commonly known three letter symbols or by the one-letter symbols recommended by the IUPAC-IUB Biochemical Nomenclature Commission.

[0098] The terms “polypeptide” and “peptide” are used interchangeably herein to refer to a polymer of amino acid residues in a single chain. The terms apply to amino acid polymers in which one or more amino acid residue is an artificial chemical mimetic of a corresponding naturally occurring amino acid, as well as to naturally occurring amino acid polymers and non-naturally occurring amino acid polymers. Amino acid polymers may comprise entirely L-amino acids, entirely D-amino acids, or a mixture of L and D amino acids.

[0099] The term “protein” as used herein refers to either a polypeptide or a dimer (i.e, two) or multimer (i.e., three or more) of single chain polypeptides. The single chain polypeptides of a protein may be joined by a covalent bond, e.g., a disulfide bond, or non-covalent interactions.

[0100] The term “linker,” as used herein, refers to a moiety that links (e.g., covalently links) two peptides or polypeptides (e.g., between an Fc polypeptide and an scFv) to connect or fuse the peptides or polypeptides. In some embodiments, a linker comprises a chemical linkage. In some embodiments, a linker comprises a peptide having a length of one or more amino acid residues. Suitable linkers for connecting or fusing peptides or polypeptides can be selected based on the properties of the linkers, such as the length, hydrophobicity, flexibility, rigidity, or cleavability of the linker.

[0101] The terms “polynucleotide” and “nucleic acid” interchangeably refer to chains of nucleotides of any length, and include DNA and RNA. The nucleotides can be deoxyribonucleotides, ribonucleotides, modified nucleotides or bases, and/or their analogs, or any substrate that can be incorporated into a chain by DNA or RNA polymerase. A polynucleotide may comprise modified nucleotides, such as methylated nucleotides and their analogs. Examples of polynucleotides contemplated herein include single- and double-stranded DNA, single- and double-stranded RNA, and hybrid molecules having mixtures of single- and double-stranded DNA and RNA.

[0102] The terms “conservative substitution” and “conservative mutation” refer to an alteration that results in the substitution of an amino acid with another amino acid that can be categorized as having a similar feature. Examples of categories of conservative amino acid groups defined in this manner can include: a “charged/polar group” including Glu (Glutamic acid or E), Asp (Aspartic acid or D), Asn (Asparagine or N), Gln (Glutamine or Q), Lys (Lysine or K), Arg (Arginine or R), and His (Histidine or H); an “aromatic group” including Phe (Phenylalanine or F), Tyr (Tyrosine or Y), Trp (Tryptophan or W), and (Histidine or H); and an “aliphatic group” including Gly (Glycine or G), Ala (Alanine or A), Val (Valine or V), Leu (Leucine or L), Ile (Isoleucine or I), Met (Methionine or M), Ser (Serine or S), Thr (Threonine or T), and Cys (Cysteine or C). Within each group, subgroups can also be identified. For example, the group of charged or polar amino acids can be sub-divided into sub-groups including: a “positively-charged sub-group” comprising Lys, Arg and His; a “negatively-charged sub-group” comprising Glu and Asp; and a “polar sub-group” comprising Asn and Gln. In another example, the aromatic or cyclic group can be sub-divided into sub-groups including: a “nitrogen ring sub-group” comprising Pro, His and Trp; and a “phenyl sub-group” comprising Phe and Tyr. In another further example, the aliphatic group can be sub-divided into sub-groups, e.g., an “aliphatic non-polar sub-group” comprising Val, Leu, Gly, and Ala; and an “aliphatic slightly-polar sub-group” comprising Met, Ser, Thr, and Cys. Examples of categories of conservative mutations include amino acid substitutions of amino acids within the sub-groups above, such as, but not limited to: Lys for Arg or vice versa, such that a positive charge can be maintained; Glu for Asp or vice versa, such that a negative charge can be maintained; Ser for Thr or vice versa, such that a free —OH can be maintained; and Gln for Asn or vice versa, such that a free —NH₂ can be maintained. In some embodiments, hydrophobic amino acids are substituted for naturally occurring hydrophobic amino acid, e.g., in the active site, to preserve hydrophobicity.

[0103] The terms “identical” or percent “identity,” in the context of two or more polypeptide sequences, refer to two or more sequences or subsequences that are the same or have a specified percentage of amino acid residues, e.g., at least 60% identity, at least 65%, at least 70%, at least 75%, at least 80%, at least 85%, at least 90%, or at least 95% or greater, that are identical over a specified region when compared and aligned for maximum correspondence over a comparison window, or designated region as measured using one a sequence comparison algorithm or by manual alignment and visual inspection.

[0104] For sequence comparison of polypeptides, typically one amino acid sequence acts as a reference sequence, to which a candidate sequence is compared. Alignment can be performed using various methods available to one of skill in the art, e.g., visual alignment or using publicly available software using known algorithms to achieve maximal alignment. Such programs include the BLAST programs, ALIGN, ALIGN-2 (Genentech, South San Francisco, Calif.) or Megalign (DNASTAR). The parameters employed for an alignment to achieve maximal alignment can be determined by one of skill in the art. For sequence comparison of polypeptide sequences for purposes of this application, the BLASTP algorithm standard protein BLAST for aligning two proteins sequence with the default parameters is used.

[0105] The terms “corresponding to,” “determined with reference to,” or “numbered with reference to” when used in the context of the identification of a given amino acid residue in a polypeptide sequence, refers to the position of the residue of a specified reference sequence when the given amino acid sequence is maximally aligned and compared to the reference sequence. Thus, for example, an amino acid residue in a modified Fc polypeptide “corresponds to” an amino acid in SEQ ID NO:1, when the residue aligns with the amino acid in SEQ ID NO:1 when optimally aligned to SEQ ID NO:1. The polypeptide that is aligned to the reference sequence need not be the same length as the reference sequence.

[0106] The terms “subject,” “individual,” and “patient,” as used interchangeably herein, refer to a mammal, including but not limited to humans, non-human primates, rodents (e.g., rats, mice, and guinea pigs), rabbits, cows, pigs, horses, and other mammalian species. In one embodiment, the patient is a human.

[0107] The terms “treatment,” “treating,” and the like are used herein to generally mean obtaining a desired pharmacologic and/or physiologic effect. “Treating” or “treatment” may refer to any indicia of success in the treatment or amelioration of a disease, including any objective or subjective parameter such as abatement, remission, improvement in patient survival, increase in survival time or rate, diminishing of symptoms or making the disease more tolerable to the patient, slowing in the rate of degeneration or decline, or improving a patient's physical or mental well-being. The treatment or amelioration of symptoms can be based on objective or subjective parameters. The effect of treatment can be compared to an individual or pool of individuals not receiving the treatment, or to the same patient prior to treatment or at a different time during treatment.

[0108] The term “pharmaceutically acceptable excipient” refers to a non-active pharmaceutical ingredient that is biologically or pharmacologically compatible for use in humans or animals, such as, but not limited to a buffer, carrier, or preservative.

[0109] As used herein, a “therapeutic amount” or “therapeutically effective amount” of an agent is an amount of the agent (e.g., any of the proteins described herein) that treats a disease in a subject.

[0110] The term “administer” refers to a method of delivering agents, compounds, or compositions to the desired site of biological action. These methods include, but are not limited to, topical delivery, parenteral delivery, intravenous delivery, intradermal delivery, intramuscular delivery, intrathecal delivery, colonic delivery, rectal delivery, or intraperitoneal delivery. In one embodiment, a protein as described herein is administered intravenously.

### III. Architectures of Bispecific Proteins

[0111] In one aspect, bispecific proteins having the ability to specifically bind to two antigens are provided. In some embodiments, the bispecific protein comprises Fc polypeptides that are fused to an antigen-binding fragment (e.g., a Fab, Fv, or scFv) that specifically binds to a first antigen and to an antigen-binding fragment (e.g., a Fab, Fv, or scFv) that specifically binds to a second antigen. In some embodiments, one or both of the Fc polypeptides of the bispecific protein is a modified Fc polypeptide (e.g., modified to promote TfR binding and/or to enhance heterodimerization of the Fc polypeptides).

[0112] In some embodiments, the bispecific protein binds to the first antigen monovalently and binds to the second antigen monovalently. In some embodiments, the bispecific protein binds to the first antigen bivalently and binds to the second antigen monovalently. In some embodiments, the bispecific protein binds to the first antigen monovalently and binds to the second antigen bivalently. In some embodiments, the bispecific protein binds to the first antigen bivalently and binds to the second antigen bivalently.

### Fab-Fc Polypeptide/scFv-Fc Polypeptide

[0113] In some embodiments, a bispecific protein comprises Fc polypeptides that are fused to a portion of a Fab that specifically binds to a first antigen and an scFv that specifically binds to a second antigen. In some embodiments, the Fab and the scFv are fused at the N-termini of the Fc polypeptides. In some embodiments, the first antigen and the second antigen are the same antigen. In some embodiments, the first antigen and the second antigen are different antigens.

[0114] In some embodiments, the bispecific protein comprises:
[0115] (a) a first Fc polypeptide that is fused at the N-terminus to an Fd portion of a Fab that specifically binds to a first antigen;
[0116] (b) a second Fc polypeptide that is fused at the N-terminus to a single-chain variable fragment (scFv) that specifically binds to a second antigen, wherein the first and second Fc polypeptides form an Fc dimer; and
[0117] (c) a light chain polypeptide that pairs with the Fd portion to form the Fab that specifically binds to the first antigen;
[0118] wherein the first Fc polypeptide and/or the second Fc polypeptide comprises a modified CH2 or modified CH3 domain and specifically binds to TfR.

[0119] In some embodiments, the first Fc polypeptide comprises a modified CH3 domain and specifically binds to TfR. In some embodiments, the second Fc polypeptide comprises a modified CH3 domain and specifically binds to TfR. In some embodiments, both the first Fc polypeptide and the second Fc polypeptide comprise a modified CH3 domain and specifically bind to TfR. In some embodiments, the first Fc polypeptide and/or the second Fc polypeptide comprises one or more modifications that promote TfR binding and/or enhance heterodimerization. Modified Fc polypeptides are further described in Section IV below. In some embodiments, one of the Fc polypeptides is a native (i.e., wild-type) immunoglobulin heavy chain Fc polypeptide having the sequence of SEQ ID NO:1.

[0120] In some embodiments, the protein comprises a Fab that specifically binds to the first antigen. The Fab is formed from the pairing of the Fd portion of the Fab, which is fused to the N-terminus of the first Fc polypeptide, with the light chain.

[0121] In some embodiments, the second Fc polypeptide is fused at the N-terminus to the scFv via a first linker. In some embodiments, the first linker has a length from about 1 to about 50 amino acids, e.g., from about 1 to about 40, from about 1 to about 30, from about 1 to about 25, from about 1 to about 20, from about 1 to about 15, from about 1 to about 10, from about 2 to about 40, from about 2 to about 30, from about 2 to about 20, from about 2 to about 10, from about 5 to about 40, from about 5 to about 30, from about 5 to about 25, or from about 5 to about 20 amino acids. In some embodiments, the first linker has a length of about 1, 2, 3, 4, 5, 6, 7, 8, 9, 10, 11, 12, 13, 14, 15, 16, 17, 18, 19, 20, 21, 22, 23, 24, 25, 30, 35, 40, 45, or 50 amino acids.

[0122] In some embodiments, the first linker comprises a flexible linker. In some embodiments, the first linker comprises a glycine-serine linker, i.e., a linker that consists primarily of, or entirely of, stretches of glycine and serine residues. In some embodiments, the first linker comprises a (G₄S)ₙ linker (GGGGS)ₙ, in which “n” indicates the number of repeats of the motif. In some embodiments, the first linker comprises a G₄S (GGGGS; SEQ ID NO:371) linker, a (G₄S)₂ (GGGGSGGGGS; SEQ ID NO:372) linker, a (G₄S)₃ (GGGGSGGGGSGGGGS; SEQ ID NO:373) linker, or a (G₄S)₂-G₄ (GGGGSGGGGSGGGG; SEQ ID NO:389) linker. In some embodiments, the first linker comprises a G₄S linker. In some embodiments, the first linker comprises a (G₄S)₂ linker. In some embodiments, the first linker comprises a (G₄S)₃ linker. In some embodiments, the first linker comprises a (G₄S)₂-G₄ linker.

[0123] In some embodiments, the scFv that specifically binds to the second antigen comprises a heavy chain variable (VH) region sequence and a light chain variable (VL) region sequence from an antibody or antibody fragment that specifically binds to the second antigen. In some embodiments, the orientation of the VL region and the VH region in the scFv that is fused to the second Fc polypeptide is VL region-VH region (i.e., the VL region is closer to the second Fc polypeptide than the VH region). In some embodiments, the orientation of the VL region and the VH region in the scFv that is fused to the second Fc polypeptide is VH region-VL region (i.e., the VH region is closer to the second Fc polypeptide than the VL region).

[0124] In some embodiments, the VL region and the VH region of the scFv are connected via a second linker. In some embodiments, the second linker has a length from about 10 to about 25 amino acids, e.g., from about 10 to about 20, from about 12 to about 25, from about 12 to about 20, from about 14 to about 25, or from about 14 to about 20 amino acids. In some embodiments, the second linker has a length of about 10, 11, 12, 13, 14, 15, 16, 17, 18, 19, 20, 21, 22, 23, 24, or 25 amino acids. In some embodiments, the second linker comprises a flexible linker. In some embodiments, the second linker comprises a glycine-serine linker, e.g., a (G₄S)ₙ linker. In some embodiments, the second linker comprises a (G₄S)₂ linker. In some embodiments, the second linker comprises a (G₄S)₃ linker. In some embodiments, the second linker comprises a (G₄S)₂-G₄ linker. In some embodiments, the second linker comprises a RTVA(G₄S)₂ (RTVAGGGGSGGGGS; SEQ ID NO:374) linker, a (RTVA(G₄S)₃) linker (RTVAGGGGSGGGGSGGGGS; SEQ ID NO:390), a ASTK(G₄S)₂ (ASTKGGGGSGGGGS; SEQ ID NO:375) linker, or a ASTK(G₄S)₃ (ASTKGGGGSGGGGSGGGGS; SEQ ID NO:391) linker.

[0125] In some embodiments, for the scFv that is fused to the second Fc polypeptide, the VL region and the VH region are connected via a second linker, wherein the orientation of the scFv is VL region-second linker-VH region (i.e., the VL region is closer to the second Fc polypeptide than the VH region). In some embodiments, the VL region and the VH region are connected via a second linker, wherein the orientation of the scFv is VH region-second linker-VL region (i.e., the VH region is closer to the second Fc polypeptide than the VL region).

[0126] In some embodiments, the scFv comprises one or more disulfide bridges between cysteine residues of the VH region and the VL region. In some embodiments, the scFv comprises a cysteine at each of positions VH44 and VL100, as numbered according to Kabat variable domain numbering. In some embodiments, the scFv comprises a disulfide bond between the cysteines at positions VH44 and VL100.

mAb/Fv

[0127] In some embodiments, a bispecific protein comprises Fc polypeptides that are fused at each N-terminus to a Fab that specifically binds to a first antigen and at the C-terminus to a heavy chain variable region or a light chain variable region of a Fab that specifically binds to a second antigen, thereby forming a protein that binds to the first antigen bivalently and to the second antigen monovalently. In some embodiments, the first antigen and the second antigen are the same antigen. In some embodiments, the first antigen and the second antigen are different antigens.

[0128] In some embodiments, the bispecific protein comprises:
[0129] (a) a first Fc polypeptide that is fused at the N-terminus to an Fd portion of a Fab that specifically binds to a first antigen, and is fused at the C-terminus to a heavy chain variable region or a light chain variable region of a Fab that specifically binds to a second antigen;
[0130] (b) a second Fc polypeptide that is fused at the N-terminus to an Fd portion of a Fab that specifically binds to a first antigen, and is fused at the C-terminus to the other of a heavy chain variable region or a light chain variable region recited in (a), wherein the heavy chain variable region and the light chain variable region together form an Fv fragment that specifically binds the second antigen, and wherein the first and second Fc polypeptides form an Fc dimer; and
[0131] (c) a light chain polypeptide that pairs with each of the Fd portions recited in (a) and (b) to form a Fab that specifically binds to the first antigen;
[0132] wherein the first Fc polypeptide and/or the second Fc polypeptide comprises a modified CH2 or modified CH3 domain and specifically binds to TfR.

[0133] In some embodiments, the first Fc polypeptide comprises a modified CH3 domain and specifically binds to TfR. In some embodiments, the second Fc polypeptide comprises a modified CH3 domain and specifically binds to TfR. In some embodiments, both the first Fc polypeptide and the second Fc polypeptide comprise a modified CH3 domain and specifically bind to TfR. In some embodiments, the first Fc polypeptide and/or the second Fc polypeptide comprises one or more modifications that promote TfR binding and/or enhance heterodimerization. Modified Fc polypeptides are further described in Section IV below. In some embodiments, one of the Fc polypeptides is a native (i.e., wild-type) immunoglobulin heavy chain Fc polypeptide having the sequence of SEQ ID NO:1.

[0134] In some embodiments, the Fd portion recited in (a) comprises identical heavy chain CDR sequences as the Fd portion recited in (b). In some embodiments, the Fd portion recited in (a) comprises an identical heavy chain variable region sequence as the Fd portion recited in (b). In some embodiments, the Fd portion recited in (a) has an identical sequence as the Fd portion recited in (b).

[0135] In some embodiments, the Fab that specifically binds to the first antigen that is formed from the pairing of the Fd portion recited in (a) with the light chain polypeptide recited in (c) is identical to the Fab that specifically binds to the first antigen that is formed from the pairing of the Fd portion recited in (b) with the light chain polypeptide recited in (c).

[0136] In some embodiments, the first Fc polypeptide is fused to the heavy chain variable region of the Fv fragment and the second Fc polypeptide is fused to the light chain variable region of the Fv fragment. In some embodiments, the first Fc polypeptide is fused to the light chain variable region of the Fv fragment and the second Fc polypeptide is fused to the heavy chain variable region of the Fv fragment.

[0137] In some embodiments, the first Fc polypeptide and/or the second Fc polypeptide is fused at the C-terminus to the heavy chain variable region or light chain variable region via a first linker. In some embodiments, the first linker has a length from about 1 to about 50 amino acids, e.g., from about 1 to about 40, from about 1 to about 30, from about 1 to about 25, from about 1 to about 20, from about 1 to about 15, from about 1 to about 10, from about 2 to about 40, from about 2 to about 30, from about 2 to about 20, from about 2 to about 10, from about 5 to about 40, from about 5 to about 30, from about 5 to about 25, or from about 5 to about 20 amino acids. In some embodiments, the first linker has a length of about 1, 2, 3, 4, 5, 6, 7, 8, 9, 10, 11, 12, 13, 14, 15, 16, 17, 18, 19, 20, 21, 22, 23, 24, 25, 30, 35, 40, 45, or 50 amino acids. In some embodiments, the first linker on the first Fc polypeptide is the same as the first linker on the second Fc polypeptide.

[0138] In some embodiments, the first linker comprises a flexible linker. In some embodiments, the first linker comprises a glycine-serine linker, e.g., a (G₄S)ₙ linker such as a G₄S linker, a (G₄S)₂ linker, a (G₄S)₃ linker, or a (G₄S)₂-G₄ linker. In some embodiments, the first linker comprises a G₄S linker. In some embodiments, the first linker comprises a (G₄S)₂ linker. In some embodiments, the first linker comprises a (G₄S)₃ linker. In some embodiments, the first linker comprises a (G₄S)₂-G₄ linker.

mAb/scFv

[0139] In some embodiments, a bispecific protein comprises Fc polypeptides that are fused at each N-terminus to a Fab that specifically binds to a first antigen and are fused at the C-terminus of one or both Fc polypeptides to an scFv that specifically binds to a second antigen. In some embodiments, the first antigen and the second antigen are the same antigen. In some embodiments, the first antigen and the second antigen are different antigens.

[0140] In some embodiments, the bispecific protein comprises:
[0141] (a) a first Fc polypeptide that is fused at the N-terminus to an Fd portion of a Fab that specifically binds to a first antigen;
[0142] (b) a second Fc polypeptide that is fused at the N-terminus to an Fd portion of a Fab that specifically binds to a first antigen, wherein the first and Fc polypeptides form an Fc dimer; and
[0143] (c) a light chain polypeptide that pairs with each of the Fd portions recited in (a) and (b) to form a Fab that specifically binds to the first antigen;
[0144] wherein the first Fc polypeptide and/or the second Fc polypeptide is fused at the C-terminus to an scFv that specifically binds to a second antigen;
[0145] wherein the first Fc polypeptide and/or the second Fc polypeptide comprises a modified CH2 or modified CH3 domain and specifically binds to TfR.

[0146] In some embodiments, the first Fc polypeptide comprises a modified CH3 domain and specifically binds to TfR. In some embodiments, the second Fc polypeptide comprises a modified CH3 domain and specifically binds to TfR. In some embodiments, both the first Fc polypeptide and the second Fc polypeptide comprise a modified CH3 domain and specifically bind to TfR. In some embodiments, the first Fc polypeptide and/or the second Fc polypeptide comprises one or more modifications that promote TfR binding and/or enhance heterodimerization. Modified Fc polypeptides are further described in Section IV below. In some embodiments, one of the Fc polypeptides is a native (i.e., wild-type) immunoglobulin heavy chain Fc polypeptide having the sequence of SEQ ID NO:1.

[0147] In some embodiments, the Fd portion recited in (a) comprises identical heavy chain CDR sequences as the Fd portion recited in (b). In some embodiments, the Fd portion recited in (a) comprises an identical heavy chain variable region sequence as the Fd portion recited in (b). In some embodiments, the Fd portion recited in (a) has an identical sequence as the Fd portion recited in (b).

[0148] In some embodiments, the Fab that specifically binds to the first antigen that is formed from the pairing of the Fd portion recited in (a) with the light chain polypeptide recited in (c) is identical to the Fab that specifically binds to the first antigen that is formed from the pairing of the Fd portion recited in (b) with the light chain polypeptide recited in (c).

[0149] In some embodiments, the first Fc polypeptide is fused at the C-terminus to an scFv that specifically binds to the second antigen. In some embodiments, the second Fc polypeptide is fused at the C-terminus to an scFv that specifically binds to the second antigen. In some embodiments, each of the first Fc polypeptide and the second Fc polypeptide is fused at the C-terminus to an scFv that specifically binds to the second antigen. In some embodiments, the scFv that is fused to the first Fc polypeptide comprises an amino acid sequence that has at least 75% sequence identity (e.g., at least 80%, at least 85%, at least 90%, at least 91%, at least 92%, at least 93%, at least 94%, at least 95%, at least 96%, at least 97%, at least 98%, or at least 99% sequence identity) to the amino acid sequence of the scFv that is fused to the second Fc polypeptide. In some embodiments, the scFv that is fused to the first Fc polypeptide comprises identical CDRs (e.g., identical heavy chain CDRs and identical light chain CDRs) as the scFv that is fused to the second Fc polypeptide. In some embodiments, the scFv that is fused to the first Fc polypeptide comprises identical heavy chain variable region and light chain variable region sequences as the scFv that is fused to the second Fc polypeptide. In some embodiments, the scFv that is fused to the first Fc polypeptide has an identical amino acid sequence as the scFv that is fused to the second Fc polypeptide.

[0150] In some embodiments, the first Fc polypeptide and/or the second Fc polypeptide is fused to the scFv via a first linker. In some embodiments, the first linker has a length from about 1 to about 50 amino acids, e.g., from about 1 to about 40, from about 1 to about 30, from about 1 to about 25, from about 1 to about 20, from about 1 to about 15, from about 1 to about 10, from about 2 to about 40, from about 2 to about 30, from about 2 to about 20, from about 2 to about 10, from about 5 to about 40, from about 5 to about 30, from about 5 to about 25, or from about 5 to about 20 amino acids. In some embodiments, the first linker has a length of about 1, 2, 3, 4, 5, 6, 7, 8, 9, 10, 11, 12, 13, 14, 15, 16, 17, 18, 19, 20, 21, 22, 23, 24, 25, 30, 35, 40, 45, or 50 amino acids.

[0151] In some embodiments, the first linker comprises a flexible linker. In some embodiments, the first linker comprises a glycine-serine linker, e.g., a (G₄S)ₙ linker such as a G₄S linker, a (G₄S)₂ linker, a (G₄S)₃ linker, or a (G₄S)₂-G₄ linker. In some embodiments, the first linker comprises a G₄S linker. In some embodiments, the first linker comprises a (G₄S)₂ linker. In some embodiments, the first linker comprises a (G₄S)₃ linker. In some embodiments, the first linker comprises a (G₄S)₂-G₄ linker.

[0152] In some embodiments, the scFv that is fused to the first Fc polypeptide and/or the second Fc polypeptide comprises a heavy chain variable (VH) region sequence and a light chain variable (VL) region sequence from an antibody or antibody fragment that specifically binds to the second antigen. In some embodiments, the orientation of the VL region and the VH region in the scFv that is fused to the first Fc polypeptide and/or the second Fc polypeptide is VL region-VH region (i.e., the VL region is closer to the second Fc polypeptide than the VH region). In some embodiments, the orientation of the VL region and the VH region in the scFv that is fused to the first Fc polypeptide and/or the second Fc polypeptide is VH region-VL region (i.e., the VH region is closer to the second Fc polypeptide than the VL region).

[0153] In some embodiments, the VL region and the VH region of the scFv are connected via a second linker. In some embodiments, the second linker has a length from about 10 to about 25 amino acids, e.g., from about 10 to about 20, from about 12 to about 25, from about 12 to about 20, from about 14 to about 25, or from about 14 to about 20 amino acids. In some embodiments, the second linker has a length of about 10, 11, 12, 13, 14, 15, 16, 17, 18, 19, 20, 21, 22, 23, 24, or 25 amino acids. In some embodiments, the second linker comprises a flexible linker. In some embodiments, the second linker comprises a glycine-serine linker, e.g., a (G₄S)ₙ linker. In some embodiments, the second linker comprises a (G₄S)₂ linker. In some embodiments, the second linker comprises a (G₄S)₃ linker. In some embodiments, the second linker comprises a (G₄S)₂-G₄ linker. In some embodiments, the second linker comprises a RTVA(G₄S)₂ linker, a RTVA(G₄S)₃ linker, a ASTK(G₄S)₂ linker, or a ASTK(G₄S)₃ linker.

[0154] In some embodiments, for the scFv that is fused to the first Fc polypeptide and/or the second Fc polypeptide, the VL region and the VH region are connected via a second linker, wherein the orientation of the scFv is VL region-second linker-VH region (i.e., the VL region is closer to the second Fc polypeptide than the VH region). In some embodiments, the VL region and the VH region are connected via a second linker, wherein the orientation of the scFv is VH region-second linker-VL region (i.e., the VH region is closer to the second Fc polypeptide than the VL region).

[0155] In some embodiments, the scFv that is fused to the first Fc polypeptide and/or the second Fc polypeptide comprises one or more disulfide bridges between cysteine residues of the VH region and the VL region. In some embodiments, the scFv comprises a cysteine at each of positions VH44 and VL100, as numbered according to Kabat variable domain numbering. In some embodiments, the scFv comprises a disulfide bond between the cysteines at positions VH44 and VL100.

[0156] For the bispecific proteins disclosed herein, methods for analyzing binding affinity, binding kinetics, and cross-reactivity are known in the art. These methods include, but are not limited to, solid-phase binding assays (e.g., ELISA assay), immunoprecipitation, surface plasmon resonance (e.g., Biacore™ (GE Healthcare, Piscataway, N.J.)), kinetic exclusion assays (e.g., KinExA®), flow cytometry, fluorescence-activated cell sorting (FACS), BioLayer interferometry (e.g., Octet® (FortéBio, Inc., Menlo Park, Calif.)), and Western blot analysis. In some embodiments, ELISA is used to determine binding affinity and/or cross-reactivity. Methods for performing ELISA assays are known in the art and are also described in the Example section below. In some embodiments, surface plasmon resonance (SPR) is used to determine binding affinity, binding kinetics, and/or cross-reactivity. In some embodiments, kinetic exclusion assays are used to determine binding affinity, binding kinetics, and/or cross-reactivity. In some embodiments, BioLayer interferometry assays are used to determine binding affinity, binding kinetics, and/or cross-reactivity

### IV. Modified Fc Polypeptides for Blood-Brain Barrier (Bbb) Receptor Binding

[0157] In some aspects, bispecific proteins that specifically bind to a first antigen and a second antigen are capable of being transported across the blood-brain barrier (BBB). Such a protein comprises a modified Fc polypeptide that binds to a BBB receptor. BBB receptors are expressed on BBB endothelia, as well as other cell and tissue types. In some embodiments, the BBB receptor is TfR.

[0158] In some embodiments, a bispecific protein comprises a first Fc polypeptide and optionally a second Fc polypeptide, each of which can be independently modified. In some embodiments, the modifications allow the bispecific protein to specifically bind to a transferrin receptor. The modifications can be introduced into specified sets of amino acids that are present at the surface of the CH3 or CH2 domain. In some embodiments, bispecific proteins comprising an Fc polypeptide comprising modified CH3 or CH2 domains specifically bind to an epitope in the apical domain of the transferrin receptor.

[0159] Amino acid residues designated in various Fc modifications, including those introduced in a modified Fc polypeptide that binds to a BBB receptor, e.g., TfR, are numbered herein using EU index numbering. Any Fc polypeptide, e.g., an IgG1, IgG2, IgG3, or IgG4 Fc polypeptide, may have modifications, e.g., amino acid substitutions, in one or more positions as described herein. One of skill understands that CH2 and CH3 domains of other immunoglobulin isotypes, e.g., IgM, IgA, IgE, IgD, etc. may be similarly modified by identifying the amino acids in those domains that correspond to the modifications described herein (e.g., the modifications in sets (i)-(vi) below). Modifications may also be made to corresponding domains from immunoglobulins from other species, e.g., non-human primates, monkey, mouse, rat, rabbit, dog, pig, chicken, and the like.

### TfR-Binding Fc Polypeptides Comprising Mutations in the CH3 Domain

[0160] In some embodiments, the domain that is modified for BBB receptor-binding activity is a human Ig CH3 domain, such as an IgG1 CH3 domain. The CH3 domain can be of any IgG subtype, i.e., from IgG1, IgG2, IgG3, or IgG4. In the context of IgG1 antibodies, a CH3 domain refers to the segment of amino acids from about position 341 to about position 447 as numbered according to the EU numbering scheme.

[0161] In some embodiments, a modified Fc polypeptide that specifically binds to TfR binds to the apical domain of TfR and may bind to TfR without blocking or otherwise inhibiting binding of transferrin to TfR. In some embodiments, binding of transferrin to TfR is not substantially inhibited. In some embodiments, binding of transferrin to TfR is inhibited by less than about 50% (e.g., less than about 45%, 40%, 35%, 30%, 25%, 20%, 15%, 10%, or 5%). In some embodiments, binding of transferrin to TfR is inhibited by less than about 20% (e.g., less than about 19%, 18%, 17%, 16%, 15%, 14%, 13%, 12%, 11%, 10%, 9%, 8%, 7%, 6%, 5%, 4%, 3%, 2%, or 1%). Illustrative CH3 domain polypeptides that exhibit this binding specificity include polypeptides having amino acid substitutions at positions 384, 386, 387, 388, 389, 390, 413, 416, and 421, according to EU numbering.

[0162] CH3 Transferrin Receptor Binding Set (i): 384, 386, 387, 388, 389, 390, 413, 416, and 421

[0163] In some embodiments, a modified Fc polypeptide that specifically binds to TfR comprises at least one, at least two, at least three, or at least four, and typically five, six, seven, eight, or nine substitutions in a set of amino acid positions comprising 384, 386, 387, 388, 389, 390, 413, 416, and 421, according to EU numbering (“set i”). Illustrative substitutions that may be introduced at these positions are shown in Table 6.

[0164] In some embodiments, a modified Fc polypeptide that specifically binds to TfR comprises at least one position having a substitution as follows: Leu, Tyr, Met, or Val at position 384; Leu, Thr, His, or Pro at position 386; Val, Pro, or an acidic amino acid at position 387; an aromatic amino acid, e.g., Trp or Gly (e.g., Trp) at position 388; Val, Ser, or Ala at position 389; an acidic amino acid, Ala, Ser, Leu, Thr, or Pro at position 413; Thr or an acidic amino acid at position 416; or Trp, Tyr, His, or Phe at position 421. In some embodiments, a modified Fc polypeptide may comprise a conservative substitution, e.g., an amino acid in the same charge grouping, hydrophobicity grouping, side chain ring structure grouping (e.g., aromatic amino acids), or size grouping, and/or polar or non-polar grouping, of a specified amino acid at one or more of the positions in the set. Thus, for example, Ile may be present at position 384, 386, and/or position 413. In some embodiments, the acidic amino acid at position one, two, or each of positions 387, 413, and 416 is Glu. In other embodiments, the acidic amino acid at one, two or each of positions 387, 413, and 416 is Asp. In some embodiments, two, three, four five, six, seven, or all eight of positions 384, 386, 387, 388, 389, 413, 416, and 421 have an amino acid substitution as specified in this paragraph.

[0165] In some embodiments, a modified Fc polypeptide having modifications in set (i) comprises a native Asn at position 390. In some embodiments, the modified Fc polypeptide comprises Gly, His, Gln, Leu, Lys, Val, Phe, Ser, Ala, or Asp at position 390. In some embodiments, the modified Fc polypeptide further comprises one, two, three, or four substitutions at positions comprising 380, 391, 392, and 415. In some embodiments, Trp, Tyr, Leu, or Gln may be present at position 380. In some embodiments, Ser, Thr, Gln, or Phe may be present at position 391. In some embodiments, Gln, Phe, or His may be present at position 392. In some embodiments, Glu may be present at position 415.

[0166] In certain embodiments, the modified Fc polypeptide comprises two, three, four, five, six, seven, eight nine, or ten positions selected from the following: Trp, Leu, or Glu at position 380; Tyr or Phe at position 384; Thr at position 386; Glu at position 387; Trp at position 388; Ser, Ala, Val, or Asn at position 389; Ser or Asn at position 390; Thr or Ser at position 413; Glu or Ser at position 415; Glu at position 416; and/or Phe at position 421. In some embodiments, the modified Fc polypeptide comprises all eleven positions as follows: Trp, Leu, or Glu at position 380; Tyr or Phe at position 384; Thr at position 386; Glu at position 387; Trp at position 388; Ser, Ala, Val, or Asn at position 389; Ser or Asn at position 390; Thr or Ser at position 413; Glu or Ser at position 415; Glu at position 416; and/or Phe at position 421.

[0167] In certain embodiments, the modified Fc polypeptide comprises Leu or Met at position 384; Leu, His, or Pro at position 386; Val at position 387; Trp at position 388; Val or Ala at position 389; Pro at position 413; Thr at position 416; and/or Trp at position 421. In some embodiments, the modified CH3 domain polypeptide further comprises Ser, Thr, Gln, or Phe at position 391. In some embodiments, a modified Fc polypeptide further comprises Trp, Tyr, Leu, or Gln at position 380 and/or Gln, Phe, or His at position 392. In some embodiments, Trp is present at position 380 and/or Gln is present at position 392. In some embodiments, a modified CH3 domain polypeptide does not have a Trp at position 380.

[0168] In other embodiments, a modified Fc polypeptide comprises Tyr at position 384; Thr at position 386; Glu or Val and position 387; Trp at position 388; Ser at position 389; Ser or Thr at position 413; Glu at position 416; and/or Phe at position 421. In some embodiments, the modified Fc polypeptide comprises a native Asn at position 390. In certain embodiments, the modified Fc polypeptide further comprises Trp, Tyr, Leu, or Gln at position 380; and/or Glu at position 415. In some embodiments, the modified Fc polypeptide further comprises Trp at position 380 and/or Glu at position 415.

[0169] In some embodiments, the modified Fc polypeptide comprises one or more of the following substitutions: Trp at position 380; Thr at position 386; Trp at position 388; Val at position 389; Ser or Thr at position 413; Glu at position 415; and/or Phe at position 421.

[0170] In additional embodiments, the modified Fc polypeptide further comprises one, two, or three positions selected from the following: position 414 is Lys, Arg, Gly, or Pro; position 424 is Ser, Thr, Glu, or Lys; and position 426 is Ser, Trp, or Gly.

[0171] In some embodiments, a modified Fc polypeptide that specifically binds to TfR has at least 70% identity, at least 75% identity, at least 80% identity, at least 85% identity, at least 90% identity, or at least 95% identity to amino acids 111-217 of any one of SEQ ID NOS:4-29, 101-164, and 239-252. In some embodiments, such a modified CH3 domain polypeptide comprises the amino acids at EU index positions 384-390 and/or 413-421 of any one of SEQ ID NOS:4-29, 101-164, and 239-252. In some embodiments, such a modified Fc polypeptide comprises the amino acids at EU index positions 380-390 and/or 413-421 of any one of SEQ ID NOS:4-29, 101-164, and 239-252. In some embodiments, a modified Fc polypeptide comprises the amino acids at EU index positions 380-392 and/or 413-426 of any one of SEQ ID NOS:4-29, 101-164, and 239-252.

[0172] In some embodiments, a modified Fc polypeptide that specifically binds to TfR has at least 70% identity, at least 75% identity, at least 80% identity, at least 85% identity, at least 90% identity, or at least 95% identity to amino acids 111-217 of SEQ ID NO:1, with the proviso that the percent identity does not include the set of positions 384, 386, 387, 388, 389, 390, 413, 416, and 421.

[0173] In some embodiments, a modified Fc polypeptide has at least 70% identity, at least 75% identity, at least 80% identity, at least 85% identity, at least 90% identity, or at least 95% identity to any one of SEQ ID NOS:4-29, 101-164, and 239-252, with the proviso that at least five, six, seven, eight, nine, ten, eleven, twelve, thirteen, fourteen, fifteen, or sixteen of the positions that correspond to positions 380, 384, 386, 387, 388, 389, 390, 391, 392, 413, 414, 415, 416, 421, 424, and 426 of any one of SEQ ID NOS:4-29, 101-164, and 239-252 are not deleted or substituted.

[0174] In some embodiments, the modified Fc polypeptide has at least 75% identity, at least 80% identity, at least 85% identity, at least 90% identity, or at least 95% identity to any one of SEQ ID NOS:4-29, 101-164, and 239-252 and also comprises at at least five, six, seven, eight, nine, ten, eleven, twelve, thirteen, fourteen, fifteen or sixteen of the positions as follows: Trp, Tyr, Leu, Gln, or Glu at position 380; Leu, Tyr, Met, or Val at position 384; Leu, Thr, His, or Pro at position 386; Val, Pro, or an acidic amino acid (e.g., Glu) at position 387; an aromatic amino acid, e.g., Trp, at position 388; Val, Ser, or Ala at position 389; Ser or Asn at position 390; Ser, Thr, Gln, or Phe at position 391; Gln, Phe, or His at position 392; an acidic amino acid, Ala, Ser, Leu, Thr, or Pro at position 413; Lys, Arg, Gly or Pro at position 414; Glu or Ser at position 415; Thr or an acidic amino acid at position 416; Trp, Tyr, His or Phe at position 421; Ser, Thr, Glu or Lys at position 424; and Ser, Trp, or Gly at position 426. In some embodiments, the modified Fc polypeptide has at least 75% identity, at least 80% identity, at least 85% identity, at least 90% identity, or at least 95% identity to any one of SEQ ID NOS:4-29, 101-164, and 239-252 and comprises a modified CH3 domain comprising Trp, Tyr, Leu, Gln, or Glu at position 380; Leu, Tyr, Met, or Val at position 384; Leu, Thr, His, or Pro at position 386; Val, Pro, or an acidic amino acid at position 387; an aromatic amino acid, e.g., Trp, at position 388; Val, Ser, or Ala at position 389; Ser or Asn at position 390; Ser, Thr, Gln, or Phe at position 391; Gln, Phe, or His at position 392; an acidic amino acid (e.g., Asp), Ala, Ser, Leu, Thr, or Pro at position 413; Lys, Arg, Gly or Pro at position 414; Glu or Ser at position 415; Thr or an acidic amino acid (e.g., Glu) at position 416; Trp, Tyr, His or Phe at position 421; Ser, Thr, Glu or Lys at position 424; and Ser, Trp, or Gly at position 426.

[0175] In some embodiments, a bispecific protein as disclosed herein comprises a modified Fc polypeptide that has at least 85% identity, at least 90% identity, or at least 95% identity to any one of SEQ ID NOs:4-29, 101-164, and 239-252, and comprises the following modifications in the CH3 domain: Glu at position 380; Tyr at position 384; Thr at position 386; Glu at position 387; Trp at position 388; Val or Ser at position 389; Asn at position 390; Ser, Thr, Gln, or Phe at position 391; Gln, Phe, or His at position 392; Asp, Ser, or Thr at position 413; Lys at position 414; Glu at position 415; Glu at position 416; Phe at position 421; Ser at position 424; and Ser at position 426.

[0176] CH3 Transferrin Receptor Binding Set (ii): 345, 346, 347, 349, 437, 438, 439, and 440

[0177] In some embodiments, a modified Fc polypeptide that specifically binds to TfR comprises at least one, at least two, at least three, or at least four, and typically five, six, seven, eight, or nine substitutions in a set of amino acid positions comprising 345, 346, 347, 349, 437, 438, 439, and 440, according to EU numbering (“set ii”). Illustrative substitutions that may be introduced at these positions are shown in Table 5.

[0178] In some embodiments, the modified Fc polypeptide comprises Gly at position 437; Phe at position 438; and/or Asp at position 213. In some embodiments, Glu is present at position 440. In certain embodiments, a modified CH3 domain polypeptide comprises at least one substitution at a position as follows: Phe or Ile at position 345; Asp, Glu, Gly, Ala, or Lys at position 346; Tyr, Met, Leu, Ile, or Asp at position 347; Thr or Ala at position 349; Gly at position 437; Phe at position 438; His Tyr, Ser, or Phe at position 439; or Asp at position 440. In some embodiments, two, three, four, five, six, seven, or all eight of positions 345, 346, 347, 349, 437, 438, 439, and 440 have a substitution as specified in this paragraph. In some embodiments, a modified Fc polypeptide may comprise a conservative substitution, e.g., an amino acid in the same charge grouping, hydrophobicity grouping, side chain ring structure grouping (e.g., aromatic amino acids), or size grouping, and/or polar or non-polar grouping, of a specified amino acid at one or more of the positions in the set.

[0179] In some embodiments, a modified Fc polypeptide that specifically binds to TfR has at least 70% identity, at least 75% identity, at least 80% identity, at least 85% identity, at least 90% identity, or at least 95% identity to amino acids 111-217 of any one of SEQ ID NOS:30-46. In some embodiments, such a modified Fc polypeptide comprises the amino acids at EU index positions 345-349 and/or 437-440 of any one of SEQ ID NOS:30-46.

[0180] In some embodiments, a modified Fc polypeptide that specifically binds to TfR has at least 70% identity, at least 75% identity, at least 80% identity, at least 85% identity, at least 90% identity, or at least 95% identity to amino acids 111-217 of SEQ ID NO:1, with the proviso that the percent identity does not include the set of positions 345, 346, 347, 349, 437, 438, 439, and 440, according to EU numbering. In some embodiments, the modified Fc polypeptide comprises the amino acids at EU index positions 345-349 and/or 437-440 as set forth in any one of SEQ ID NOS:30-46.

[0181] In some embodiments, a modified Fc polypeptide that specifically binds to TfR has at least 70% identity, at least 75% identity, at least 80% identity, at least 85% identity, at least 90% identity, or at least 95% identity to any one of SEQ ID NOS:30-46 and comprises a modified CH3 domain comprising Phe or Ile at position 345; Asp, Glu, Gly, Ala, or Lys at position 346; Tyr, Met, Leu, Ile, or Asp at position 347; Thr or Ala at position 349; Gly at position 437; Phe at position 438; His Tyr, Ser, or Phe at position 439; or Asp at position 440.

[0182] TfR-Binding Fc Polypeptides Comprising Mutations in the CH2 Domain

[0183] In some embodiments, the domain that is modified for BBB receptor-binding activity is a human Ig CH2 domain, such as an IgG CH2 domain. The CH2 domain can be of any IgG subtype, i.e., from IgG1, IgG2, IgG3, or IgG4. In the context of IgG1 antibodies, a CH2 domain refers to the segment of amino acids from about position 231 to about position 340 as numbered according to the EU numbering scheme.

[0184] As indicated above, sets of residues of a CH2 domain that can be modified in accordance with the invention are numbered according to EU numbering. Any CH2 domain, e.g., an IgG1, IgG2, IgG3, or IgG4 CH2 domain, may have modifications, e.g., amino acid substitutions, in one or more sets of residues that correspond to residues at the noted positions.

[0185] In one embodiment, a modified Fc polypeptide that specifically binds to TfR binds to an epitope in the apical domain of the transferrin receptor. The modified Fc polypeptide may bind to TfR without blocking or otherwise inhibiting binding of transferrin to the receptor. In some embodiments, binding of transferrin to TfR is not substantially inhibited. In some embodiments, binding of transferrin to TfR is inhibited by less than about 50% (e.g., less than about 45%, 40%, 35%, 30%, 25%, 20%, 15%, 10%, or 5%). In some embodiments, binding of transferrin to TfR is inhibited by less than about 20% (e.g., less than about 19%, 18%, 17%, 16%, 15%, 14%, 13%, 12%, 11%, 10%, 9%, 8%, 7%, 6%, 5%, 4%, 3%, 2%, or 1%).

[0186] CH2 Transferrin Receptor Binding Set (iii): 274, 276, 283, 285, 286, 287, 288, 289, and 290

[0187] In some embodiments, a modified Fc polypeptide that specifically binds to TfR comprises at least one, at least two, at least three, or at least four, and typically five, six, seven, eight, or nine substitutions in a set of amino acid positions comprising 274, 276, 283, 285, 286, 287, 288, and 290, according to EU numbering (“set iii”). Illustrative substitutions that may be introduced at these positions are shown in Table 1.

[0188] In some embodiments, the modified Fc polypeptide comprises Glu at position 287 and/or Trp at position 288. In some embodiments, the modified Fc polypeptide comprises at least one substitution at a position as follows: Glu, Gly, Gln, Ser, Ala, Asn, Tyr, or Trp at position 274; Ile, Val, Asp, Glu, Thr, Ala, or Tyr at position 276; Asp, Pro, Met, Leu, Ala, Asn, or Phe at position 283; Arg, Ser, Ala, or Gly at position 285; Tyr, Trp, Arg, or Val at position 286; Glu at position 287; Trp or Tyr at position 288; Gln, Tyr, His, Ile, Phe, Val, or Asp at position 289; or Leu, Trp, Arg, Asn, Tyr, or Val at position 290. In some embodiments, two, three, four, five, six, seven, eight, or all nine of positions 274, 276, 283, 285, 286, 287, 288, and 290 have a substitution as specified in this paragraph. In some embodiments, the modified Fc polypeptide may comprise a conservative substitution, e.g., an amino acid in the same charge grouping, hydrophobicity grouping, side chain ring structure grouping (e.g., aromatic amino acids), or size grouping, and/or polar or non-polar grouping, of a specified amino acid at one or more of the positions in the set.

[0189] In some embodiments, the modified Fc polypeptide comprises Glu, Gly, Gln, Ser, Ala, Asn, or Tyr at position 274; Ile, Val, Asp, Glu, Thr, Ala, or Tyr at position 276; Asp, Pro, Met, Leu, Ala, or Asn at position 283; Arg, Ser, or Ala at position 285; Tyr, Trp, Arg, or Val at position 286; Glu at position 287; Trp at position 288; Gln, Tyr, His, Ile, Phe, or Val at position 289; and/or Leu, Trp, Arg, Asn, or Tyr at position 290. In some embodiments, the modified Fc polypeptide comprises Arg at position 285; Tyr or Trp at position 286; Glu at position 287; Trp at position 288; and/or Arg or Trp at position 290.

[0190] In some embodiments, a modified Fc polypeptide that specifically binds to TfR has at least 70% identity, at least 75% identity, at least 80% identity, at least 85% identity, at least 90% identity, or at least 95% identity to amino acids 1-110 of any one of SEQ ID NOS:47-62. In some embodiments, such a modified Fc polypeptide comprises the amino acids at EU index positions 374-276 and/or 283-290 of any one of SEQ ID NOS:47-62.

[0191] In some embodiments, a modified Fc polypeptide that specifically binds to TfR has at least 70% identity, at least 75% identity, at least 80% identity, at least 85% identity, at least 90% identity, or at least 95% identity to amino acids 1-110 of SEQ ID NO:1, with the proviso that the percent identity does not include the set of positions 274, 276, 283, 285, 286, 287, 288, and 290, according to EU numbering. In some embodiments, the modified CH2 domain polypeptide comprises the amino acids at EU index positions 374-276 and/or 283-290 as set forth in any one of SEQ ID NOS:47-62.

[0192] In additional embodiments, a modified Fc polypeptide that specifically binds to TfR has at least 70% identity, at least 75% identity, at least 80% identity, at least 85% identity, at least 90% identity, or at least 95% identity to any one of SEQ ID NOS:47-62 and comprises a modified CH2 domain comprising Glu, Gly, Gln, Ser, Ala, Asn, or Tyr at position 274; Ile, Val, Asp, Glu, Thr, Ala, or Tyr at position 276; Asp, Pro, Met, Leu, Ala, or Asn at position 283; Arg, Ser, or Ala at position 285; Tyr, Trp, Arg, or Val at position 286; Glu at position 287; Trp at position 288; Gln, Tyr, His, Ile, Phe, or Val at position 289; and/or Leu, Trp, Arg, Asn, or Tyr at position 290.

[0193] CH2 Transferrin Receptor Binding Set (iv): 274, 276, 283, 285, 286, 287, 288, 289, and 290

[0194] In some embodiments, a modified Fc polypeptide that specifically binds to TfR comprises at least one, at least two, at least three, or at least four, and typically five, six, seven, eight, nine, or ten substitutions in a set of amino acid positions comprising 266, 267, 268, 269, 270, 271, 295, 297, 298, and 299, according to EU numbering (“set iv”). Illustrative substitutions that may be introduced at these positions are shown in Table 2.

[0195] In some embodiments, a modified Fc polypeptide that specifically binds to TfR comprises Pro at position 270, Glu at position 295, and/or Tyr at position 297. In some embodiments, the modified Fc polypeptide comprises at least one substitution at a position as follows: Pro, Phe, Ala, Met, or Asp at position 266; Gln, Pro, Arg, Lys, Ala, Ile, Leu, Glu, Asp, or Tyr at position 267; Thr, Ser, Gly, Met, Val, Phe, Trp, or Leu at position 268; Pro, Val, Ala, Thr, or Asp at position 269; Pro, Val, or Phe at position 270; Trp, Gln, Thr, or Glu at position 271; Glu, Val, Thr, Leu, or Trp at position 295; Tyr, His, Val, or Asp at position 297; Thr, His, Gln, Arg, Asn, or Val at position 298; or Tyr, Asn, Asp, Ser, or Pro at position 299. In some embodiments, two, three, four, five, six, seven, eight, nine, or all ten of positions 266, 267, 268, 269, 270, 271, 295, 297, 298, and 299 have a substitution as specified in this paragraph. In some embodiments, a modified Fc polypeptide may comprise a conservative substitution, e.g., an amino acid in the same charge grouping, hydrophobicity grouping, side chain ring structure grouping (e.g., aromatic amino acids), or size grouping, and/or polar or non-polar grouping, of a specified amino acid at one or more of the positions in the set.

[0196] In some embodiments, the modified Fc polypeptide comprises Pro, Phe, or Ala at position 266; Gln, Pro, Arg, Lys, Ala, or Ile at position 267; Thr, Ser, Gly, Met, Val, Phe, or Trp at position 268; Pro, Val, or Ala at position 269; Pro at position 270; Trp or Gln at position 271; Glu at position 295; Tyr at position 297; Thr, His, or Gln at position 298; and/or Tyr, Asn, Asp, or Ser at position 299.

[0197] In some embodiments, the modified Fc polypeptide comprises Met at position 266; Leu or Glu at position 267; Trp at position 268; Pro at position 269; Val at position 270; Thr at position 271; Val or Thr at position 295; His at position 197; His, Arg, or Asn at position 198; and/or Pro at position 299.

[0198] In some embodiments, the modified Fc polypeptide comprises Asp at position 266; Asp at position 267; Leu at position 268; Thr at position 269; Phe at position 270; Gln at position 271; Val or Leu at position 295; Val at position 297; Thr at position 298; and/or Pro at position 299.

[0199] In some embodiments, a modified Fc polypeptide that specifically binds to TfR has at least 70% identity, at least 75% identity, at least 80% identity, at least 85% identity, at least 90% identity, or at least 95% identity to amino acids 1-110 of any one of SEQ ID NOS:63-85. In some embodiments, such a modified Fc polypeptide comprises the amino acids at EU index positions 266-271 and/or 295-299 as set forth in any one of SEQ ID NOS:63-85.

[0200] In some embodiments, a modified Fc polypeptide that specifically binds to TfR has at least 70% identity, at least 75% identity, at least 80% identity, at least 85% identity, at least 90% identity, or at least 95% identity to amino acids 1-110 of SEQ ID NO:1, with the proviso that the percent identity does not include the set of positions 266, 267, 268, 269, 270, 271, 295, 297, 298, and 299, according to EU numbering. In some embodiments, the modified CH2 domain polypeptide comprises the amino acids at EU index positions 266-271 and/or 295-299 as set forth in any one of SEQ ID NOS:63-85.

[0201] In some embodiments, a modified Fc polypeptide that specifically binds to TfR comprises an amino acid sequence having at least 75% identity, at least 80% identity, at least 85% identity, at least 90% identity, or at least 95% identity to amino acids 39-72 of any one of SEQ ID NOS:63-85 and comprises a modified CH2 domain comprising Pro, Phe, or Ala at position 266; Gln, Pro, Arg, Lys, Ala, or Ile at position 267; Thr, Ser, Gly, Met, Val, Phe, or Trp at position 268; Pro, Val, or Ala at position 269; Pro at position 270; Trp or Gln at position 271; Glu at position 295; Tyr at position 297; Thr, His, or Gln at position 298; and/or Tyr, Asn, Asp, or Ser at position 299.

[0202] CH2 Transferrin Receptor Binding Set (v): 268, 269, 270, 271, 272, 292, 293, 294, 296, and 300

[0203] In some embodiments, a modified Fc polypeptide that specifically binds to TfR comprises at least one, at least two, at least three, or at least four, and typically five, six, seven, eight, nine, or ten substitutions in a set of amino acid positions comprising 268, 269, 270, 271, 272, 292, 293, 294, 296, and 300, according to EU numbering (“set v”). Illustrative substitutions that may be introduced at these positions are shown in Table 3.

[0204] In some embodiments, a modified Fc polypeptide that specifically binds to TfR comprises at least one substitution at a position as follows: Val or Asp at position 268; Pro, Met, or Asp at position 269; Pro or Trp at position 270; Arg, Trp, Glu, or Thr at position 271; Met, Tyr, or Trp at position 272; Leu or Trp at position 292; Thr, Val, Ile, or Lys at position 293; Ser, Lys, Ala, or Leu at position 294; His, Leu, or Pro at position 296; or Val or Trp at position 300. In some embodiments, two, three, four, five, six, seven, eight, nine, or all ten of positions 268, 269, 270, 271, 272, 292, 293, 294, and 300 have a substitution as specified in this paragraph. In some embodiments, the modified Fc polypeptide may comprise a conservative substitution, e.g., an amino acid in the same charge grouping, hydrophobicity grouping, side chain ring structure grouping (e.g., aromatic amino acids), or size grouping, and/or polar or non-polar grouping, of a specified amino acid at one or more of the positions in the set.

[0205] In some embodiments, the modified Fc polypeptide comprises Val at position 268; Pro at position 269; Pro at position 270; Arg or Trp at position 271; Met at position 272; Leu at position 292; Thr at position 293; Ser at position 294; His at position 296; and/or Val at position 300.

[0206] In some embodiments, the modified Fc polypeptide comprises Asp at position 268; Met or Asp at position 269; Trp at position 270; Glu or Thr at position 271; Tyr or Trp at position 272; Trp at position 292; Val, Ile, or Lys at position 293; Lys, Ala, or Leu at position 294; Leu or Pro at position 296; and/or Trp at position 300.

[0207] In some embodiments, a modified Fc polypeptide that specifically binds to TfR has at least 70% identity, at least 75% identity, at least 80% identity, at least 85% identity, at least 90% identity, or at least 95% identity to amino acids 1-110 of any one of SEQ ID NOS:86-90. In some embodiments, such a modified Fc polypeptide comprises the amino acids at EU index positions 268-272 and/or 292-300 as set forth in any one of SEQ ID NOS:86-90.

[0208] In some embodiments, a modified Fc polypeptide that specifically binds to TfR has at least 70% identity, at least 75% identity, at least 80% identity, at least 85% identity, at least 90% identity, or at least 95% identity to amino acids 1-110 of SEQ ID NO:1, with the proviso that the percent identity does not include the set of positions 268, 269, 270, 271, 272, 292, 293, 294, 296, and 300, according to EU numbering. In some embodiments, the modified CH2 domain polypeptide comprises the amino acids at EU index positions 268-272 and/or 292-300 as set forth in any one of SEQ ID NOS:86-90.

[0209] In some embodiments, a modified Fc polypeptide that specifically binds to TfR comprises a sequence having at least 75% identity, at least 80% identity, at least 85% identity, at least 90% identity, or at least 95% identity to amino acids 41-73 of any one of SEQ ID NOS:86-90 and comprises a modified CH2 domain comprising Val or Asp at position 268; Pro, Met, or Asp at position 269; Pro or Trp at position 270; Arg, Trp, Glu, or Thr at position 271; Met, Tyr, or Trp at position 272; Leu or Trp at position 292; Thr, Val, Ile, or Lys at position 293; Ser, Lys, Ala, or Leu at position 294; His, Leu, or Pro at position 296; or Val or Trp at position 300.

[0210] CH2 Transferrin Receptor Binding Set (vi): 272, 274, 276, 322, 324, 326, 329, 330, and 331

[0211] In some embodiments, a modified Fc polypeptide that specifically binds to TfR comprises at least one, at least two, at least three, or at least four, and typically five, six, seven, eight, or nine substitutions in a set of amino acid positions comprising 272, 274, 276, 322, 324, 326, 329, 330, and 331, according to EU numbering (“set vi”). Illustrative substitutions that may be introduced at these positions are shown in Table 4.

[0212] In some embodiments, a modified Fc polypeptide that specifically binds to TfR comprises Trp at position 330. In some embodiments, the modified Fc polypeptide comprises at least one substitution at a position as follows: Trp, Val, Ile, or Ala at position 272; Trp or Gly at position 274; Tyr, Arg, or Glu at position 276; Ser, Arg, or Gln at position 322; Val, Ser, or Phe at position 324; Ile, Ser, or Trp at position 326; Trp, Thr, Ser, Arg, or Asp at position 329; Trp at position 330; or Ser, Lys, Arg, or Val at position 331. In some embodiments, two, three, four, five, six, seven, eight, or all nine of positions 272, 274, 276, 322, 324, 326, 329, 330, and 331 have a substitution as specified in this paragraph. In some embodiments, the modified Fc polypeptide may comprise a conservative substitution, e.g., an amino acid in the same charge grouping, hydrophobicity grouping, side chain ring structure grouping (e.g., aromatic amino acids), or size grouping, and/or polar or non-polar grouping, of a specified amino acid at one or more of the positions in the set.

[0213] In some embodiments, the modified Fc polypeptide comprises two, three, four, five, six, seven, eight, or nine positions selected from the following: position 272 is Trp, Val, Ile, or Ala; position 274 is Trp or Gly; position 276 is Tyr, Arg, or Glu; position 322 is Ser, Arg, or Gln; position 324 is Val, Ser, or Phe; position 326 is Ile, Ser, or Trp; position 329 is Trp, Thr, Ser, Arg, or Asp; position 330 is Trp; and position 331 is Ser, Lys, Arg, or Val. In some embodiments, the modified Fc polypeptide comprises Val or Ile at position 272; Gly at position 274; Arg at position 276; Arg at position 322; Ser at position 324; Ser at position 326; Thr, Ser, or Arg at position 329; Trp at position 330; and/or Lys or Arg at position 331.

[0214] In some embodiments, a modified Fc polypeptide that specifically binds to TfR has at least 70% identity, at least 75% identity, at least 80% identity, at least 85% identity, at least 90% identity, or at least 95% identity to amino acids 1-110 of any one of SEQ ID NOS:91-95. In some embodiments, such a modified Fc polypeptide comprises the amino acids at EU index positions 272-276 and/or 322-331 as set forth in any one of SEQ ID NOS:91-95.

[0215] In some embodiments, a modified Fc polypeptide that specifically binds to TfR has at least 70% identity, at least 75% identity, at least 80% identity, at least 85% identity, at least 90% identity, or at least 95% identity to amino acids 4-113 of SEQ ID NO:1, with the proviso that the percent identity does not include the set of positions 272, 274, 276, 322, 324, 326, 329, 330, and 331, according to EU numbering. In some embodiments, the modified CH2 domain polypeptide comprises the amino acids at EU index positions 272-276 and/or 322-331 as set forth in any one of SEQ ID NOS:91-95.

[0216] In some embodiments, a transferrin receptor-binding polypeptide comprises an amino acid sequence having at least 75% identity, at least 80% identity, at least 85% identity, at least 90% identity, or at least 95% identity to any one of SEQ ID NOS:91-95 and comprises a modified CH2 domain comprising Trp, Val, Ile, or Ala at position 272; Trp or Gly at position 274; Tyr, Arg, or Glu at position 276; Ser, Arg, or Gln at position 322; Val, Ser, or Phe at position 324; Ile, Ser, or Trp at position 326; Trp, Thr, Ser, Arg, or Asp at position 329; Trp at position 330; or Ser, Lys, Arg, or Val at position 331.

### Additional Fc Polypeptide Modifications

[0217] In some embodiments, one or both Fc polypeptides contains one or more additional modifications. Non-limiting examples of other mutations that can be introduced into one or both Fc polypeptides include, e.g., mutations to increase serum stability and/or half-life, to modulate effector function, to influence glycosylation, to reduce immunogenicity in humans, and/or to provide for knob and hole heterodimerization of the Fc polypeptides.

[0218] In some embodiments, one or both Fc polypeptides has an amino acid sequence identity of at least about 75%, 76%, 77%, 78%, 79%, 80%, 81%, 82%, 83%, 84%, 85%, 86%, 87%, 88%, 89%, 90%, 91%, 92%, 93%, 94%, 95%, 96%, 97%, 98%, or 99% to a corresponding wild-type Fc polypeptide (e.g., a human IgG1, IgG2, IgG3, or IgG4 Fc polypeptide).

[0219] In some embodiments, the Fc polypeptides include knob and hole mutations to promote heterodimer formation and hinder homodimer formation. Generally, the modifications introduce a protuberance (“knob”) at the interface of a first polypeptide and a corresponding cavity (“hole”) in the interface of a second polypeptide, such that the protuberance can be positioned in the cavity so as to promote heterodimer formation and thus hinder homodimer formation. Protuberances are constructed by replacing small amino acid side chains from the interface of the first polypeptide with larger side chains (e.g., tyrosine or tryptophan). Compensatory cavities of identical or similar size to the protuberances are created in the interface of the second polypeptide by replacing large amino acid side chains with smaller ones (e.g., alanine or threonine). In some embodiments, such additional mutations are at a position in the Fc polypeptide that does not have a negative effect on binding of the polypeptide to a BBB receptor, e.g., TfR.

[0220] In one illustrative embodiment of a knob and hole approach for dimerization, position 366 (numbered according to the EU numbering scheme) of one of the Fc polypeptides present in the bispecific antibody comprises a tryptophan in place of a native threonine. The other Fc polypeptide of the bispecific protein has a valine at position 407 (numbered according to the EU numbering scheme) in place of the native tyrosine. The other Fc polypeptide may further comprise a substitution in which the native threonine at position 366 (numbered according to the EU numbering scheme) is substituted with a serine and a native leucine at position 368 (numbered according to the EU numbering scheme) is substituted with an alanine. Thus, one of the Fc polypeptides of the bispecific protein has the T366W knob mutation and the other Fc polypeptide has the Y407V mutation, which is typically accompanied by the T366S and L368A hole mutations.

[0221] In some embodiments, one or both Fc polypeptides comprises a modification at one or more of positions 251, 252, 254, 255, 256, 307, 308, 309, 311, 312, 314, 385, 386, 387, 389, 428, 433, 434, or 436, according to the EU numbering scheme. In some embodiments, mutations are introduced into one, two, or three of positions 255, 254, and 256 according to EU numbering. In some embodiments, the mutations are M252Y, S254T, and T256E according to EU numbering. Thus, one or both Fc polypeptides may have M252Y, S254T, and T256E substitutions. In some embodiments, a modified Fc polypeptide further comprises mutations M252Y, S254T, and T256E. In some embodiments, mutations are introduced into one or two of positions 428 and 434 according to the EU numbering scheme. In some embodiments, the mutations are M428L and N434S (“LS”) according to EU numbering. In some embodiments, a modified Fc polypeptide further comprises mutation N434S with or without M428L. In some embodiments, a modified Fc polypeptide comprises a substitution at one, two or all three of positions T307, E380, and N434 according to EU numbering. In some embodiments, one or both Fc polypeptides comprises M428L and N434S substitutions. In some embodiments, one or both Fc polypeptides comprises an N434S or N434A substitution. In some embodiments, the mutations are T307Q and N434A. In some embodiments, a modified Fc polypeptide comprises mutations T307A, E380A, and 434A. In some embodiments, a modified Fc polypeptide comprises substitutions at positions T250 and M428 according to EU numbering. In some embodiments, a modified Fc polypeptide comprises mutations T250Q and M428L. In some embodiments, a modified Fc polypeptide comprises substitutions at positions M428 and N434 according to EU numbering. In some embodiments, a modified Fc polypeptide comprises substitutions M428L and N434S. In some embodiments, a modified Fc polypeptide comprises an N434S or N434A substitution. In some embodiments, an Fc polypeptide that comprises one or more modifications that promote binding to TfR does not comprise LS substitutions. In some embodiments, an Fc polypeptide that does not comprise one or more modifications that promote binding to TfR comprises LS substitutions. In some embodiments, an Fc polypeptide that comprises one or more modifications that promote binding to TfR does not comprise LS substitutions, and an Fc polypeptide that does not comprise one or more modifications that promote binding to TfR comprises LS substitutions. In some embodiments, both Fc polypeptides comprise LS substitutions.

[0222] In some embodiments, one or both Fc polypeptides may comprise modifications that reduce effector function, i.e., having a reduced ability to induce certain biological functions upon binding to an Fc receptor expressed on an effector cell that mediates the effector function. Examples of antibody effector functions include, but are not limited to, C1q binding and complement dependent cytotoxicity (CDC), Fc receptor binding, antibody-dependent cell-mediated cytotoxicity (ADCC), antibody-dependent cell-mediated phagocytosis (ADCP), down-regulation of cell surface receptors (e.g., B cell receptor), and B-cell activation. Effector functions may vary with the antibody class. For example, native human IgG1 and IgG3 antibodies can elicit ADCC and CDC activities upon binding to an appropriate Fc receptor present on an immune system cell; and native human IgG1, IgG2, IgG3, and IgG4 can elicit ADCP functions upon binding to the appropriate Fc receptor present on an immune cell.

[0223] In some embodiments, one or both Fc polypeptides may also be engineered to contain other modifications for heterodimerization, e.g., electrostatic engineering of contact residues within a CH3-CH3 interface that are naturally charged or hydrophobic patch modifications.

[0224] In some embodiments, one or both Fc polypeptides may include additional modifications that modulate effector function.

[0225] In some embodiments, one or both Fc polypeptides may comprise modifications that reduce or eliminate effector function. Illustrative Fc polypeptide mutations that reduce effector function include, but are not limited to, substitutions in a CH2 domain, e.g., at positions 234 and 235, according to the EU numbering scheme. For example, in some embodiments, one or both Fc polypeptides can comprise alanine residues at positions 234 and 235. Thus, one or both Fc polypeptides may have L234A and L235A (“LALA”) substitutions. In some embodiments, an Fc polypeptide that comprises one or more modifications that promote binding to TfR further comprises LALA substitutions. In some embodiments, an Fc polypeptide that does not comprise one or more modifications that promote binding to TfR comprises LALA substitutions. In some embodiments, both Fc polypeptides comprise LALA substitutions.

[0226] Additional Fc polypeptide mutations that modulate an effector function include, but are not limited to, one or more substitutions at positions 238, 265, 269, 270, 297, 327 and 329, according to the EU numbering scheme. Illustrative substitutions include the following: position 329 may have a mutation in which proline is substituted with a glycine or arginine or an amino acid residue large enough to destroy the Fc/Fcγ receptor interface that is formed between proline 329 of the Fc and tryptophan residues Trp 87 and Trp 110 of FcγRIII. Additional illustrative substitutions include S228P, E233P, L235E, N297A, N297D, and P331S, according to the EU numbering scheme. Multiple substitutions may also be present, e.g., L234A and L235A of a human IgG1 Fc region; L234A, L235A, and P329G of an IgG1 Fc region; S228P and L235E of a human IgG4 Fc region; L234A and G237A of a human IgG1 Fc region; L234A, L235A, and G237A of a human IgG1 Fc region; V234A and G237A of a human IgG2 Fc region; L235A, G237A, and E318A of a human IgG4 Fc region; and S228P and L236E of a human IgG4 Fc region, according to the EU numbering scheme. In some embodiments, one or both Fc polypeptides may have one or more amino acid substitutions that modulate ADCC, e.g., substitutions at positions 298, 333, and/or 334, according to the EU numbering scheme.

[0227] In some embodiments, one or both Fc polypeptides may comprise a modification that removes the C-terminal lysine from the Fc polypeptide. For example, for a polypeptide that comprises an Fc polypeptide that is fused at the C-terminus to an scFv or an Fv, in some embodiments the Fc polypeptide lacks a C-terminal lysine. In some embodiments, removal of a C-terminal lysine from the Fc polypeptide may reduce or prevent proteolytic cleavage of an scFv or Fv that is fused to the Fc polypeptide.

### Illustrative Modified Fc Polypeptides

[0228] By way of non-limiting example, one or both Fc polypeptides present in a bispecific protein as disclosed herein may comprise additional mutations including a knob mutation (e.g., T366W as numbered according to the EU numbering scheme), hole mutations (e.g., T366S, L368A, and Y407V as numbered according to the EU numbering scheme), mutations that modulate effector function (e.g., L234A, L235A, and/or P329G (e.g., L234A and L235A) as numbered according to the EU numbering scheme), and/or mutations that increase serum stability (e.g., (i) M252Y, S254T, and T256E as numbered according to the EU numbering scheme, or (ii) N434S with or without M428L as numbered with reference to EU numbering). In some embodiments, a bispecific protein comprise (i) a first Fc polypeptide that comprises one or more modifications that promote TfR binding and further comprises one or more additional modifications (e.g., a knob mutation, hole mutations, mutations that modulate effector function, and/or mutations that increase serum stability), and (ii) a second Fc polypeptide that comprises one or more modifications (e.g., mutations that promote TfR binding, a knob mutation, hole mutations, mutations that modulate effector function, and/or mutations that increase serum stability).

[0229] In some embodiments, the modified Fc polypeptide has at least 85% identity, at least 90% identity, or at least 95% identity to the sequence of any one of SEQ ID NOs:1, 4-95, or 101-388 and comprises a knob mutation (e.g., T366W as numbered with reference to EU numbering). In some embodiments, the modified Fc polypeptide comprises the sequence of any one of SEQ ID NOs:167, 179, 191, 203, 215, 227, 253, 265, 277, 289, or 383.

[0230] In some embodiments, the modified Fc polypeptide has at least 85% identity, at least 90% identity, or at least 95% identity to the sequence of any one of SEQ ID NOs:1, 4-95, or 101-388 and comprises a knob mutation (e.g., T366W as numbered with reference to EU numbering) and mutations that modulate effector function (e.g., L234A, L235A, and/or P329G (e.g., L234A and L235A) as numbered with reference to EU numbering). In some embodiments, the modified Fc polypeptide comprises the sequence of any one of SEQ ID NOs:168, 169, 180, 181, 192, 193, 204, 205, 216, 217, 228, 229, 254, 255, 266, 267, 278, 279, 290, 291, or 384.

[0231] In some embodiments, the modified Fc polypeptide has at least 85% identity, at least 90% identity, or at least 95% identity to the sequence of any one of SEQ ID NOs:1, 4-95, or 101-388 and comprises a knob mutation (e.g., T366W as numbered with reference to EU numbering) and mutations that increase serum half-life (e.g., M252Y, S254T, and T256E, or N434S with or without M428L, as numbered with reference to EU numbering). In some embodiments, the modified Fc polypeptide comprises the sequence of any one of SEQ ID NOs:170, 182, 194, 206, 218, 230, 256, 268, 280, 292, 302, 309, 316, 323, 330, 337, 344, 351, 358, 365, 385, or 387.

[0232] In some embodiments, the modified Fc polypeptide has at least 85% identity, at least 90% identity, or at least 95% identity to the sequence of any one of SEQ ID NOs:1, 4-95, or 101-388 and comprises a knob mutation (e.g., T366W as numbered with reference to EU numbering), mutations that modulate effector function (e.g., L234A, L235A, and/or P329G (e.g., L234A and L235A) as numbered with reference to EU numbering), and mutations that increase serum half-life (e.g., M252Y, S254T, and T256E, or N434S with or without M428L, as numbered with reference to EU numbering). In some embodiments, the modified Fc polypeptide comprises the sequence of any one of SEQ ID NOs:171, 172, 183, 184, 195, 196, 207, 208, 219, 220, 231, 232, 257, 258, 269, 270, 281, 282, 293, 294, 303, 304, 310, 311, 317, 318, 324, 325, 331, 332, 338, 339, 345, 346, 352, 353, 359, 360, 366, 367, 386, or 388.

[0233] In some embodiments, the modified Fc polypeptide has at least 85% identity, at least 90% identity, or at least 95% identity to the sequence of any one of SEQ ID NOs:1, 4-95, or 101-388 and comprises hole mutations (e.g., T366S, L368A, and Y407V as numbered with reference to EU numbering). In some embodiments, the modified Fc polypeptide comprises the sequence of any one of SEQ ID NOs:173, 185, 197, 209, 221, 233, 259, 271, 283, 295, or 377.

[0234] In some embodiments, the modified Fc polypeptide has at least 85% identity, at least 90% identity, or at least 95% identity to the sequence of any one of SEQ ID NOs:1, 4-95, or 101-388 and comprises hole mutations (e.g., T366S, L368A, and Y407V as numbered with reference to EU numbering) and mutations that modulate effector function (e.g., L234A, L235A, and/or P329G (e.g., L234A and L235A) as numbered with reference to EU numbering). In some embodiments, the modified Fc polypeptide comprises the sequence of any one of SEQ ID NOs:174, 175, 186, 187, 198, 199, 210, 211, 222, 223, 234, 235, 260, 261, 272, 273, 284, 285, 296, 297, or 378.

[0235] In some embodiments, the modified Fc polypeptide has at least 85% identity, at least 90% identity, or at least 95% identity to the sequence of any one of SEQ ID NOs:1, 4-95, or 101-388 and comprises hole mutations (e.g., T366S, L368A, and Y407V as numbered with reference to EU numbering) and mutations that increase serum half-life (e.g., M252Y, S254T, and T256E, or N434S with or without M428L, as numbered with reference to EU numbering). In some embodiments, the modified Fc polypeptide comprises the sequence of any one of SEQ ID NOs:176, 188, 200, 212, 224, 236, 262, 274, 286, 298, 305, 312, 319, 326, 333, 340, 347, 354, 361, 368, 379, or 381.

[0236] In some embodiments, the modified Fc polypeptide has at least 85% identity, at least 90% identity, or at least 95% identity to the sequence of any one of SEQ ID NOs:1, 4-95, or 101-388 and comprises hole mutations (e.g., T366S, L368A, and Y407V as numbered with reference to EU numbering), mutations that modulate effector function (e.g., L234A, L235A, and/or P329G (e.g., L234A and L235A) as numbered with reference to EU numbering), and mutations that increase serum half-life (e.g., M252Y, S254T, and T256E, or as numbered with reference to EU numbering). In some embodiments, the modified Fc polypeptide comprises the sequence of any one of SEQ ID NOs:177, 178, 189, 190, 201, 202, 213, 214, 225, 226, 237, 238, 263, 264, 275, 276, 287, 288, 299, 300, 306, 307, 313, 314, 320, 321, 327, 328, 334, 335, 341, 342, 348, 349, 355, 356, 362, 363, 369, 370, 380, or 382.

[0237] In some embodiments, a bispecific protein as disclosed herein (e.g., a bispecific protein having an architecture disclosed in Section III above) comprises (i) a first Fc polypeptide that comprises the TfR binding site of a clone having the sequence of any one of SEQ ID NOs:SEQ ID NOs:4-95, 101-164, and 239-252 and further comprises a knob mutation (e.g., T366W according to EU numbering), L234A and L235A mutations as numbered with reference to EU numbering, and optionally M428L and N434S mutations as numbered with reference to EU numbering; and (ii) a second Fc polypeptide that comprises hole mutations (e.g., T366S, L368A, and Y407V according to EU numbering) and L234A and L235A mutations as numbered with reference to EU numbering, and optionally, M428L and N434S mutations as numbered with reference to EU numbering. In some embodiments, the first Fc polypeptide comprises the TfR binding site of a clone having the sequence of SEQ ID NO:105, SEQ ID NO:145, or SEQ ID NO:146 and further comprises a knob mutation (e.g., T366W), L234A and L235A, and optionally M428L and N434S mutations. In some embodiments, the first Fc polypeptide comprises the amino acid sequence of any one of SEQ ID NOs:192, 204, 228, 316, 324, or 337. In some embodiments, the second Fc polypeptide comprises the amino acid sequence of SEQ ID NO:378 or SEQ ID NO:382.

### V. Preparation of Bispecific Proteins

[0238] For preparing a bispecific protein as described herein, many techniques known in the art can be used. In some embodiments, the genes encoding the heavy and light chains of an antibody of interest (e.g., an antibody that binds to a first antigen or an antibody that binds to a second antigen) can be cloned from a cell, e.g, from a hybridoma. Gene libraries encoding heavy and light chains of monoclonal antibodies can also be made from hybridoma or plasma cells. Alternatively, phage or yeast display technology can be used to identify antibodies and Fab fragments that specifically bind to selected antigens.

[0239] Bispecific proteins can be produced using any number of expression systems, including prokaryotic and eukaryotic expression systems. In some embodiments, the expression system is a mammalian cell expression system, such as a hybridoma, or a CHO cell expression system. Many such systems are widely available from commercial suppliers. In some embodiments, the polynucleotides encoding the polypeptides that comprise the bispecific protein may be expressed using a single vector, e.g., in a di-cistronic expression unit, or under the control of different promoters. In other embodiments, the polynucleotides encoding the polypeptides that comprise the bispecific protein may be expressed using separate vectors.

[0240] In some aspects, the disclosure provides isolated nucleic acids comprising a nucleic acid sequence encoding any of the polypeptides comprising bispecific proteins as described herein; vectors comprising such nucleic acids; and host cells into which the nucleic acids are introduced that are used to replicate the nucleic acids and/or to express the bispecific proteins.

[0241] In some embodiments, a polynucleotide (e.g., an isolated polynucleotide) comprises a nucleotide sequence encoding a polynucleotide comprising a polypeptide that comprises the bispecific protein as disclosed herein (e.g., as described in the Section III above). In some embodiments, a polynucleotide as described herein is operably linked to a heterologous nucleic acid, e.g., a heterologous promoter.

[0242] Suitable vectors containing polynucleotides encoding antibodies of the present disclosure, or fragments thereof, include cloning vectors and expression vectors. While the cloning vector selected may vary according to the host cell intended to be used, useful cloning vectors generally have the ability to self-replicate, may possess a single target for a particular restriction endonuclease, and/or may carry genes for a marker that can be used in selecting clones containing the vector. Examples include plasmids and bacterial viruses, e.g., pUC18, pUC19, Bluescript (e.g., pBS SK+) and its derivatives, mp18, mp19, pBR322, pMB9, ColE1, pCR1, RP4, phage DNAs, and shuttle vectors such as pSA3 and pAT28. These and many other cloning vectors are available from commercial vendors such as BioRad, Strategene, and Invitrogen.

[0243] Expression vectors generally are replicable polynucleotide constructs that contain a nucleic acid of the present disclosure. The expression vector may replicate in the host cells either as episomes or as an integral part of the chromosomal DNA. Suitable expression vectors include but are not limited to plasmids, viral vectors, including adenoviruses, adeno-associated viruses, retroviruses, and any other vector.

[0244] Suitable host cells for cloning or expressing a polynucleotide or vector as described herein include prokaryotic or eukaryotic cells. In some embodiments, the host cell is prokaryotic. In some embodiments, the host cell is eukaryotic, e.g., Chinese Hamster Ovary (CHO) cells or lymphoid cells. In some embodiments, the host cell is a human cell, e.g., a Human Embryonic Kidney (HEK) cell.

[0245] In another aspect, methods of making a bispecific protein as described herein are provided. In some embodiments, the method includes culturing a host cell as described herein (e.g., a host cell expressing a polynucleotide or vector as described herein) under conditions suitable for expression of the bispecific protein. In some embodiments, the bispecific protein is subsequently recovered from the host cell (or host cell culture medium). In some embodiments, the bispecific protein is purified, e.g., by chromatography.

### VI. Therapeutic Methods

[0246] In another aspect, therapeutic methods using bispecific proteins having the ability to specifically bind to two antigens as described herein are provided. In some embodiments, methods of treating a disease are provided. In some embodiments, methods of modulating one or more biological activities associated with a disease are provided.

[0247] In some embodiments, a bispecific protein comprising a first Fc polypeptide and/or a second Fc polypeptide comprises a modified CH3 domain and specifically binds to a transferrin receptor is used to transfer the bispecific protein across an endothelium, e.g., the blood-brain barrier, to be taken up by the brain.

[0248] In some embodiments, a bispecific protein as disclosed herein may be used to treat a neurological disorder such as a disease of the brain or central nervous system (CNS). Illustrative diseases include Alzheimer's Disease, Parkinson's disease, amyotrophic lateral sclerosis, frontotemporal dementia, vascular dementia, Lewy body dementia, Pick's disease, primary age-related tauopathy, or progressive supranuclear palsy. In some embodiments, the disease may be a tauopathy, a prion disease (such as bovine spongiform encephalopathy, scrapie, Creutzfeldt-Jakob syndrome, kuru, Gerstmann-Straussler-Scheinker disease, chronic wasting disease, and fatal familial insomnia), bulbar palsy, motor neuron disease, or a nervous system heterodegenerative disorders (such as Canavan disease, Huntington's disease, neuronal ceroid-lipofuscinosis, Alexander's disease, Tourette's syndrome, Menkes kinky hair syndrome, Cockayne syndrome, Halervorden-Spatz syndrome, lafora disease, Rett syndrome, hepatolenticular degeneration, Lesch-Nyhan syndrome, Friedreich's ataxia, Spinal muscular atrophy, and Unverricht-Lundborg syndrome). In some embodiments, the disease is stroke or multiple sclerosis. In some embodiments, the patient may be asymptomatic, but has a marker that is associated with the disease of the brain or CNS. In some embodiments, the use of a bispecific protein as disclosed herein in the manufacture of a medicament for treating a neurological disorder is provided.

[0249] In some embodiments, a bispecific protein as disclosed herein is used for the treatment of cancer. In certain embodiments, the cancer is a primary cancer of the CNS, such as glioma, glioblastoma multiforme, meningioma, astrocytoma, acoustic neuroma, chondroma, oligodendroglioma, medulloblastomas, ganglioglioma, Schwannoma, neurofibroma, neuroblastoma, or extradural, intramedullary or intradural tumors. In some embodiments, the cancer is a solid tumor, or in other embodiments, the cancer is a non-solid tumor. Solid-tumor cancers include tumors of the central nervous system, breast cancer, prostate cancer, skin cancer (including basal cell carcinoma, cell carcinoma, squamous cell carcinoma and melanoma), cervical cancer, uterine cancer, lung cancer, ovarian cancer, testicular cancer, thyroid cancer, astrocytoma, glioma, pancreatic cancer, mesotheliomas, gastric cancer, liver cancer, colon cancer, rectal cancer, renal cancer including nephroblastoma, bladder cancer, oesophageal cancer, cancer of the larynx, cancer of the parotid, cancer of the biliary tract, endometrial cancer, adenocarcinomas, small cell carcinomas, neuroblastomas, adrenocortical carcinomas, epithelial carcinomas, desmoid tumors, desmoplastic small round cell tumors, endocrine tumors, Ewing sarcoma family tumors, germ cell tumors, hepatoblastomas, hepatocellular carcinomas, non-rhabdomyosarcome soft tissue sarcomas, osteosarcomas, peripheral primitive neuroectodermal tumors, retinoblastomas, and rhabdomyosarcomas. In some embodiments, the use of a bispecific protein as disclosed herein in the manufacture of a medicament for treating cancer is provided.

[0250] In some embodiments, a bispecific protein as disclosed herein may be used in the treatment of an autoimmune or inflammatory disease. Examples of such diseases include, but are not limited to, ankylosing spondylitis, arthritis, osteoarthritis, rheumatoid arthritis, psoriatic arthritis, asthma, scleroderma, stroke, atherosclerosis, Crohn's disease, colitis, ulcerative colitis, dermatitis, diverticulitis, fibrosis, idiopathic pulmonary fibrosis, fibromyalgia, hepatitis, irritable bowel syndrome (IBS), lupus, systemic lupus erythematous (SLE), nephritis, multiple sclerosis, and ulcerative colitis. In some embodiments, the use of a bispecific protein as disclosed herein in the manufacture of a medicament for treating an autoimmune or inflammatory disease is provided.

[0251] In some embodiments, a bispecific protein as disclosed herein may be used in the treatment of a cardiovascular disease, such as coronary artery disease, heart attack, abnormal heart rhythms or arrhythmias, heart failure, heart valve disease, congenital heart disease, heart muscle disease, cardiomyopathy, pericardial disease, aorta disease, marfan syndrome, vascular disease, and blood vessel disease. In some embodiments, the use of a bispecific protein as disclosed herein in the manufacture of a medicament for treating a cardiovascular disease is provided.

[0252] In some embodiments, the method further comprises administering to the subject one or more additional therapeutic agents. For example, in some embodiments for treating a disease of the brain or central nervous system, the method may comprise administering to the subject a neuroprotective agent, e.g., an anticholinergic agent, a dopaminergic agent, a glutamatergic agent, a histone deacetylase (HDAC) inhibitor, a cannabinoid, a caspase inhibitor, melatonin, an anti-inflammatory agent, a hormone (e.g., estrogen or progesterone), or a vitamin. In some embodiments, the method comprises administering to the subject an agent for use in treating a cognitive or behavioral symptom of a neurological disorder (e.g., an antidepressant, a dopamine agonist, or an anti-psychotic).

[0253] A bispecific protein as disclosed herein is administered to a subject at a therapeutically effective amount or dose. Illustrative dosages include a daily dose range of about 0.01 mg/kg to about 500 mg/kg, or about 0.1 mg/kg to about 200 mg/kg, or about 1 mg/kg to about 100 mg/kg, or about 10 mg/kg to about 50 mg/kg, can be used. The dosages, however, may be varied according to several factors, including the chosen route of administration, the formulation of the composition, patient response, the severity of the condition, the subject's weight, and the judgment of the prescribing physician. The dosage can be increased or decreased over time, as required by an individual patient. In some embodiments, a patient initially is given a low dose, which is then increased to an efficacious dosage tolerable to the patient. Determination of an effective amount is well within the capability of those skilled in the art.

[0254] In various embodiments, a bispecific protein as disclosed herein is administered parenterally. In some embodiments, the bispecific protein is administered intravenously. Intravenous administration can be by infusion, e.g., over a period of from about 10 to about 30 minutes, or over a period of at least 1 hour, 2 hours, or 3 hours. In some embodiments, the bispecific protein is administered as an intravenous bolus. Combinations of infusion and bolus administration may also be used.

[0255] In some parenteral embodiments, a bispecific protein is administered intraperiotneally, subcutaneously, intradermally, or intramuscularly. In some embodiments, the bispecific protein is administered intradermally or intramuscularly. In some embodiments, the bispecific protein is administered intrathecally, such as by epidural administration, or intracerebroventricularly.

[0256] In other embodiments, the bispecific protein may be administered orally, by pulmonary administration, intranasal administration, intraocular administration, or by topical administration. Pulmonary administration can also be employed, e.g., by use of an inhaler or nebulizer, and formulation with an aerosolizing agent.

### VII. Pharmaceutical Compositions and Kits

[0257] In another aspect, pharmaceutical compositions and kits comprising a bispecific protein having the ability to specifically bind to two antigens are provided. In some embodiments, the bispecific protein is a bispecific protein as described in Section III above.

### Pharmaceutical Compositions

[0258] In some embodiments, a pharmaceutical composition comprises a bispecific protein as described herein (e.g., a bispecific protein having the ability to specifically bind to two antigens) and further comprises one or more pharmaceutically acceptable carriers and/or excipients. Guidance for preparing formulations can be found in any number of handbooks for pharmaceutical preparation and formulation that are known to those of skill in the art.

[0259] A pharmaceutically acceptable carrier includes any solvents, dispersion media, or coatings that are physiologically compatible and that preferably does not interfere with or otherwise inhibit the activity of the active agent. Various pharmaceutically acceptable excipients are well-known in the art.

[0260] In some embodiments, the carrier is suitable for intravenous, intramuscular, oral, intraperitoneal, intrathecal, transdermal, topical, or subcutaneous administration. Pharmaceutically acceptable carriers can contain one or more physiologically acceptable compound(s) that act, for example, to stabilize the composition or to increase or decrease the absorption of the active agent(s). Physiologically acceptable compounds can include, for example, carbohydrates, such as glucose, sucrose, or dextrans, antioxidants, such as ascorbic acid or glutathione, chelating agents, low molecular weight proteins, compositions that reduce the clearance or hydrolysis of the active agents, or excipients or other stabilizers and/or buffers. Other pharmaceutically acceptable carriers and their formulations are well-known in the art.

[0261] Pharmaceutical compositions can be manufactured in a manner that is known to those of skill in the art, e.g., by means of conventional mixing, dissolving, granulating, dragee-making, emulsifying, encapsulating, entrapping or lyophilizing processes. The methods and excipients disclosed herein are merely exemplary and are in no way limiting.

[0262] For oral administration, a bispecific protein as disclosed herein can be formulated by combining it with pharmaceutically acceptable carriers that are well known in the art. Such carriers enable the compounds to be formulated as tablets, pills, dragees, capsules, emulsions, lipophilic and hydrophilic suspensions, liquids, gels, syrups, slurries, suspensions and the like, for oral ingestion by a patient to be treated. Pharmaceutical preparations for oral use can be obtained by mixing the compounds with a solid excipient, optionally grinding a resulting mixture, and processing the mixture of granules, after adding suitable auxiliaries, if desired, to obtain tablets or dragee cores. Suitable excipients include, for example, fillers such as sugars, including lactose, sucrose, mannitol, or sorbitol; cellulose preparations such as, for example, maize starch, wheat starch, rice starch, potato starch, gelatin, gum tragacanth, methyl cellulose, hydroxypropylmethyl-cellulose, sodium carboxymethylcellulose, and/or polyvinylpyrrolidone (PVP). If desired, disintegrating agents can be added, such as a cross-linked polyvinyl pyrrolidone, agar, or alginic acid or a salt thereof such as sodium alginate.

[0263] A bispecific protein as disclosed herein can be formulated for parenteral administration by injection, e.g., by bolus injection or continuous infusion. For injection, the bispecific protein can be formulated into preparations by dissolving, suspending or emulsifying them in an aqueous or nonaqueous solvent, such as vegetable or other similar oils, synthetic aliphatic acid glycerides, esters of higher aliphatic acids or propylene glycol; and if desired, with conventional additives such as solubilizers, isotonic agents, suspending agents, emulsifying agents, stabilizers and preservatives. In some embodiments, bispecific proteins can be formulated in aqueous solutions, preferably in physiologically compatible buffers such as Hanks's solution, Ringer's solution, or physiological saline buffer. Formulations for injection can be presented in unit dosage form, e.g., in ampules or in multi-dose containers, with an added preservative. The compositions can take such forms as suspensions, solutions or emulsions in oily or aqueous vehicles, and can contain formulatory agents such as suspending, stabilizing and/or dispersing agents.

[0264] In some embodiments, a bispecific protein as disclosed herein is prepared for delivery in a sustained-release, controlled release, extended-release, timed-release or delayed-release formulation, for example, in semi-permeable matrices of solid hydrophobic polymers containing the active agent. Various types of sustained-release materials have been established and are well known by those skilled in the art. Current extended-release formulations include film-coated tablets, multiparticulate or pellet systems, matrix technologies using hydrophilic or lipophilic materials and wax-based tablets with pore-forming excipients. Sustained-release delivery systems can, depending on their design, release the compounds over the course of hours or days, for instance, over 4, 6, 8, 10, 12, 16, 20, or 24 hours or more. Usually, sustained release formulations can be prepared using naturally occurring or synthetic polymers, for instance, polymeric vinyl pyrrolidones, such as polyvinyl pyrrolidone (PVP); carboxyvinyl hydrophilic polymers; hydrophobic and/or hydrophilic hydrocolloids, such as methylcellulose, ethylcellulose, hydroxypropylcellulose, and hydroxypropylmethylcellulose; and carboxypolymethylene.

[0265] Typically, a pharmaceutical composition for use in in vivo administration is sterile. Sterilization can be accomplished according to methods known in the art, e.g., heat sterilization, steam sterilization, sterile filtration, or irradiation.

[0266] Dosages and desired drug concentration of pharmaceutical compositions of the disclosure may vary depending on the particular use envisioned. The determination of the appropriate dosage or route of administration is well within the skill of one in the art. Suitable dosages are also described in Section VI above.

### Kits

[0267] In some embodiments, a kit comprising a bispecific protein as described herein (e.g., a bispecific protein having the ability to specifically bind to two antigens) for use according to a method disclosed herein are provided. In some embodiments, the kit is for use in treating a neurodegenerative disease, e.g., Alzheimer's disease. preventing or treating a neurological disorder such as a disease of the brain or central nervous system (CNS).

[0268] In some embodiments, the kit further comprises one or more additional therapeutic agents. For example, in some embodiments, the kit comprises a bispecific protein as described herein and further comprises one or more additional therapeutic agents for use in the treatment of a neurodegenerative disease. In some embodiments, the kit further comprises instructional materials containing directions (i.e., protocols) for the practice of the methods described herein (e.g., instructions for using the kit for treating a neurodegenerative disease). While the instructional materials typically comprise written or printed materials they are not limited to such. Any medium capable of storing such instructions and communicating them to an end user is contemplated by this invention. Such media include, but are not limited to electronic storage media (e.g., magnetic discs, tapes, cartridges, chips), optical media (e.g., CD-ROM), and the like. Such media may include addresses to internet sites that provide such instructional materials.

### VIII. Transgenic Animals

[0269] Further, the disclosure also provides non-human transgenic animals (e.g., a rodent such as a mouse or a rat) that comprise (a) a nucleic acid that encodes a chimeric TfR polypeptide comprising: (i) an apical domain having at least 90% identity to SEQ ID NO:392 and (ii) the transferrin binding site of the native TfR polypeptide of the animal, and (b) a transgene of a mutant microtubule associated protein Tau (MAPT) gene, e.g., wherein the chimeric TfR polypeptide and/or the Tau protein is expressed in the brain of the animal. The chimeric forms of the transferrin receptor include a non-human (e.g., mouse) mammalian transferrin binding site and an apical domain that is heterologous to the domain containing the transferrin binding site. These chimeric receptors can be expressed in transgenic animals, particularly where the transferrin binding site is derived from the transgenic animal species and where the apical domain is derived from a primate (e.g., human or monkey). The nucleic acid encoding the chimeric TfR polypeptide can be “knocked-in” to the genome of the aminal (e.g., at the endogenous locus), resulting in the animal expressing the chimeric TfR polypeptide in place of the endogenous TfR polypeptide. The chimeric TfR polypeptide can comprise an amino acid sequence having at least 95% (e.g., 97%, 98%, or 99%) identity to SEQ ID NO:396. Also described herein is a polynucleotide encoding a chimeric transferrin receptor that comprises a non-human mammalian transferrin binding site and an apical domain having an amino acid sequence at least 80%, 90%, 95%, or 98% identical to SEQ ID NO:392. The nucleic acid sequence encoding the apical domain can comprise a nucleic acid sequence having at least 95% (e.g., 97%, 98%, or 99%) identity to SEQ ID NO:397. The transgenic animal can be homozygous or heterozygous for the nucleic acid encoding the chimeric TfR polypeptide. Further, in some embodiments, the mutant MAPT gene encodes a mutant human Tau protein. For example, the mutant human Tau protein comprises the amino acid substitution P272S relative to the sequence of SEQ ID NO:398.

[0270] The disclosure also provides a non-human, for example, non-primate, transgenic animal (e.g., a rodent such as a mouse or a rat) expressing such chimeric TfRs and a transgene of a mutant microtubule associated protein Tau (MAPT) gene and the use of the non-human transgenic animal to screen for polypeptides that can cross the BBB by binding to human transferrin receptor (huTfR) in vivo. In some embodiments, the non-human transgenic animal contains a native transferrin receptor (such as a mouse transferrin receptor (mTfR)), in which the apical domain is replaced with an orthologous apical domain having an amino acid sequence at least 80%, 90%, 95%, or 98% identical to SEQ ID NO:392, thereby leaving the native transferrin binding site and the majority, e.g., at least 70%, or at least 75%, of the sequence encoding the transferrin receptor intact. This non-human transgenic animal thus maximally retains the transferrin-binding functionality of the endogenous transferrin receptor of the non-human animal, including the ability to maintain proper iron homeostasis as well as bind and transport transferrin. As a result, the transgenic animal is healthy and suitable for use in discovery and development of therapeutics for treating brain diseases.

### IX. Examples

[0271] The present invention will be described in greater detail by way of specific examples. The following examples are offered for illustrative purposes only, and are not intended to limit the invention in any manner. Those of skill in the art will readily recognize a variety of noncritical parameters which can be changed or modified to yield essentially the same results. Efforts have been made to ensure accuracy with respect to numbers used (e.g., amounts, temperatures, etc.), but some experimental error and deviation may be present. The practice of the present invention will employ, unless otherwise indicated, conventional methods of protein chemistry, biochemistry, recombinant DNA techniques and pharmacology, within the skill of the art. Such techniques are explained fully in the literature. Additionally, it should be apparent to one of skill in the art that the methods for engineering as applied to certain libraries can also be applied to other libraries described herein.

### Example 1. Design and Characterization of Engineered Transferrin Receptor Binding Polypeptides

[0272] This example describes the design, generation, and characterization of polypeptides of the present invention. For the purposes of this example and comparing the amino acids that are the same in clone sequences, a “conserved” mutation is considered to be one that occurred in all of the identified clones (not a conservative amino acid substitution), while a “semi-conserved” mutation is one that occurs in >50% of clones.

[0273] Unless otherwise indicated, the positions of amino acid residues in this section are numbered based on EU index numbering for a human IgG1 wild-type Fc region.

### Design of Polypeptide Fc Region Domain Libraries

[0274] New molecular recognition was engineered into polypeptide Fc regions by selecting certain solvent exposed surface patches for modification, constructing surface display libraries in which the amino acid composition of the selected patch was altered by randomization and then screening the surface-displayed sequence variants for desired functionality using standard expression display techniques. As used herein, the term “randomization” includes partial randomization as well as sequence changes with pre-defined nucleotide or amino acid mixing ratios. Typical surface-exposed patches selected for randomization had areas between about 600 to 1500 Å², and comprised about 7 to 15 amino acids.

### Clone Registers

[0275] The following registers were designed and generated according to the methods described herein. As used herein, the term “register” refers to a series of surface-exposed amino acid residues that form a contiguous surface that can be altered (e.g., by the introduction of mutations into the peptide coding gene sequences to produce amino acid substitutions, insertions, and/or deletions at the positions listed in the registers).

[0276] CH2 Register A2—Set (iii)

[0277] The CH2A2 register (Table 1) included amino acid positions 274, 276, 283, 285, 286, 287, 288, 289, and 290, according to EU numbering. The CH2A2 register was designed to form a surface along a beta sheet, an adjacent turn, and a following loop. It is well removed from both the FcγR and FcRn binding sites.

[0278] CH2 Register C—Set (iv)

[0279] The CH2C register (Table 2) included amino acid positions 266, 267, 268, 269, 270, 271, 295, 2972, 298, and 299, according to EU numbering. The CH2C register utilizes solvent-exposed residues along a series of loops near the hinge and very close to the FcγR binding site of the CH2 region.

[0280] CH2 Register D—Set (v)

[0281] The CH2D register (Table 3) included amino acid positions 268, 269, 270, 271, 272, 292, 293, 294, 296, and 300, according to EU numbering. 41, 42, 43, 44, 45, 65, 66, 67, 69, and 73. The CH2D register, similar to CH2C, utilizes solvent-exposed residues along a series of loops at the top of the CH2 region, very close to the FcγR binding site. The CH2C and CH2D registers largely share one loop and differ in the second loop utilized for binding.

[0282] CH2 Register E—Set (vi)

[0283] The CH2E3 register (Table 4) included amino acid positions 272, 274, 276, 322, 324, 326, 329, 330, and 331, according to EU numbering. 45, 47, 49, 95, 97, 99, 102, 103, and 104. The CH2E3 register positions are also close to the FcγR binding site, but utilize solvent-exposed residues on beta sheets that are adjacent to the loops near the FcγR binding site, in addition to some of the loop residues.

[0284] CH3 Register B—Set (ii)

[0285] The CH3B register (Table 5) included amino acid positions 345, 346, 347, 349, 437, 438, 439, and 440, according to EU numbering. 118, 119, 120, 122, 210, 211, 212, and 213. The CH3B register is largely made up of solvent-exposed residues on two parallel beta sheets along with several less-structured residues near the C-terminus of the CH3 region. It is distant from the FcγR and FcRn binding sites.

[0286] CH3 Register C—Set (i)

[0287] The CH3C register (Table 6) included amino acid positions 384, 386, 387, 388, 389, 390, 413, 416, and 421, according to EU numbering. The CH3C register positions form a contiguous surface by including surface-exposed residues from two loops, both distant from the FcγR and FcRn binding sites.

TABLE 1
CH2A2 Register Positions and Mutations

| Sequence | Seq. | | | | | | | | | | | | |
|---|---|---|---|---|---|---|---|---|---|---|---|---|---|
| name | group | 274 | 275 | 276 | . . . | 283 | 284 | 285 | 286 | 287 | 288 | 289 | 290 |
| Wild- | n/a | K | F | N | . . . | E | V | H | N | A | K | T | K |
| type | | | | | | | | | | | | | |
| CH2A2.1 | 1 | E | F | I | . . . | D | V | R | Y | E | W | Q | L |
| CH2A2.2 | 1 | G | F | V | . . . | P | V | S | W | E | W | Y | W |
| CH2A2.3 | 1 | Q | F | D | . . . | M | V | R | R | E | W | H | R |
| CH2A2.4 | 1 | S | F | E | . . . | P | V | R | W | E | W | Q | W |
| CH2A2.5 | 1 | A | F | T | . . . | P | V | R | W | E | W | Q | N |
| CH2A2.6 | 1 | N | F | D | . . . | L | V | R | R | E | W | H | R |
| CH2A2.7 | 1 | Q | F | V | . . . | A | V | R | W | E | W | I | R |
| CH2A2.8 | 1 | E | F | I | . . . | E | V | A | W | E | W | F | W |
| CH2A2.9 | 1 | G | F | A | . . . | N | V | R | V | E | W | Q | Y |
| CH2A2.10 | 1 | G | F | V | . . . | E | V | R | R | E | W | V | R |
| CH2A2.11 | 1 | S | F | D | . . . | L | V | R | R | E | W | Q | R |
| CH2A2.12 | 1 | E | F | T | . . . | D | V | R | Y | E | W | Y | Y |
| CH2A2.13 | 1 | Q | F | T | . . . | D | V | R | Y | E | W | V | R |
| CH2A2.14 | 1 | Q | F | Y | . . . | N | V | R | R | E | W | H | R |
| CH2A2.15 | 1 | Y | F | D | . . . | M | V | R | R | E | W | H | R |
| CH2A2.I6 | 2 | W | F | E | . . . | F | V | G | V | A | Y | D | V |

TABLE 2
CH2C Register Positions and Mutations

| Se- | Seq. | | | | | | | | | | | | |
|---|---|---|---|---|---|---|---|---|---|---|---|---|---|
| quence | | | | | | | | | | | | | |
| name | group | 266 | 267 | 268 | 269 | 270 | 271 | . . . | 295 | 296 | 297 | 298 | 299 |
| Wild- | n/a | V | S | H | E | D | P | . . . | Q | Y | N | S | T |
| type | | | | | | | | | | | | | |
| CH2C.1 | 1 | P | Q | T | P | P | W | . . . | E | Y | Y | T | Y |
| CH2C.2 | 1 | P | P | S | P | P | W | . . . | E | Y | Y | S | N |
| CH2C.3 | 1 | P | Q | T | P | P | W | . . . | E | Y | Y | S | N |
| CH2C.4 | 1 | F | R | G | P | P | W | . . . | E | Y | Y | H | D |
| CH2C.5 | 1 | P | Q | T | V | P | W | . . . | E | Y | Y | S | N |
| CH2C.6 | 1 | P | K | M | P | P | W | . . . | E | Y | Y | T | Y |
| CH2C.7 | 1 | P | P | V | P | P | W | . . . | E | Y | Y | S | N |
| CH2C.8 | 1 | P | A | F | P | P | W | . . . | E | Y | Y | Q | N |
| CH2C.9 | 1 | A | I | W | P | P | W | . . . | E | Y | Y | S | N |
| CH2C.10 | 1 | P | P | V | A | P | W | . . . | E | Y | Y | S | S |
| CH2C.11 | 1 | P | Q | M | P | P | Q | . . . | E | Y | Y | S | N |
| CH2C.12 | 1 | P | Q | T | A | P | W | . . . | E | Y | Y | T | Y |
| CH2C.13 | 1 | P | Q | T | P | P | Q | . . . | E | Y | Y | S | N |
| CH2C.14 | 1 | P | Q | T | P | P | W | . . . | E | Y | Y | T | Y |
| CH2C.15 | 1 | P | R | V | P | P | W | . . . | E | Y | Y | Q | N |
| CH2C.16 | 1 | P | S | V | P | P | W | . . . | E | Y | Y | S | N |
| CH2C.17 | 2 | M | L | W | P | V | P | . . . | V | Y | H | R | P |
| CH2C.18 | 2 | M | L | W | P | V | P | . . . | T | Y | H | N | P |
| CH2C.19 | 2 | M | E | W | P | V | T | . . . | T | Y | H | H | P |
| CH2C.20 | 2 | M | L | W | P | V | P | . . . | T | Y | H | H | P |
| CH2C.21 | 3 | D | D | L | T | F | Q | . . . | V | Y | V | T | P |
| CH2C.22 | 3 | D | D | L | T | F | Q | . . . | L | Y | V | T | P |
| CH2C.23 | 4 | A | Y | G | D | P | E | . . . | W | Y | D | V | P |

TABLE 3
CH2D Register Positions and Mutations

| Sequence | Seq. | | | | | | | | | | | | | | | |
|---|---|---|---|---|---|---|---|---|---|---|---|---|---|---|---|---|
| name | group | 268 | 269 | 270 | 271 | 272 | . . . | 292 | 293 | 294 | 295 | 296 | 297 | 298 | 299 | 300 |
| Wild- | n/a | H | E | D | P | E | . . . | R | E | E | Q | Y | N | S | T | Y |
| type | | | | | | | | | | | | | | | | |
| CH2D.1 | 1 | V | P | P | R | M | . . . | L | T | S | Q | H | N | S | T | V |
| CH2D.2 | 1 | V | P | P | W | M | . . . | L | T | S | Q | H | N | S | T | V |
| CH2D.3 | 2 | D | M | W | E | Y | . . . | W | V | K | Q | L | N | S | T | W |
| CH2D.4 | 2 | D | D | W | T | W | . . . | W | I | A | Q | P | N | S | T | W |
| CH2D.5 | 2 | D | D | W | E | W | . . . | W | K | L | Q | L | N | S | T | W |

TABLE 4
CH2E3 Register Positions and Mutations

| Se- | | | | | | | | | | | | | | | | | |
|---|---|---|---|---|---|---|---|---|---|---|---|---|---|---|---|---|---|
| quence | Seq. | | | | | | | | | | | | | | | | |
| name | group | 272 | 273 | 274 | 275 | 276 | . . . | 322 | 323 | 324 | 325 | 326 | 327 | 328 | 329 | 330 | 331 |
| Wild- | n/a | E | V | K | F | N | . . . | K | V | S | N | K | A | L | P | A | P |
| type | | | | | | | | | | | | | | | | | |
| CH2E3.1 | 1 | W | V | W | F | Y | . . . | S | V | V | N | I | A | L | W | W | S |
| CH2E3.2 | 2 | V | V | G | F | R | . . . | R | V | S | N | S | A | L | T | W | K |
| CH2E3.3 | 2 | V | V | G | F | R | . . . | R | V | S | N | S | A | L | S | W | R |
| CH2E3.4 | 2 | I | V | G | F | R | . . . | R | V | S | N | S | A | L | R | W | R |
| CH2E3.5 | 3 | A | V | G | F | E | . . . | Q | V | F | N | W | A | L | D | W | V |

TABLE 5
CH3B Register Positions and Mutations

| Sequence | Seq. | | | | | | | | | | |
|---|---|---|---|---|---|---|---|---|---|---|---|
| name | group | 345 | 346 | 347 | 348 | 349 | . . . | 437 | 438 | 439 | 440 |
| Wild- | n/a | E | P | Q | V | Y | . . . | T | Q | K | S |
| type | | | | | | | | | | | |
| CH3B.1 | 1 | F | D | Y | V | T | . . . | G | F | H | D |
| CH3B.2 | 1 | F | D | M | V | T | . . . | G | F | H | D |
| CH3B.3 | 1 | F | E | Y | V | T | . . . | G | F | H | D |
| CH3B.4 | 1 | F | E | M | V | T | . . . | G | F | H | D |
| CH3B.5 | 1 | F | E | L | V | T | . . . | G | F | H | D |
| CH3B.6 | 1 | F | E | I | V | T | . . . | G | F | H | D |
| CH3B.7 | 1 | F | D | I | V | T | . . . | G | F | H | D |
| CH3B.8 | 1 | F | D | Y | V | T | . . . | G | F | H | D |
| CH3B.9 | 1 | F | G | M | V | T | . . . | G | F | H | D |
| CH3B.10 | 1 | F | A | D | V | T | . . . | G | F | Y | D |
| CH3B.11 | 1 | F | G | L | V | T | . . . | G | F | H | D |
| CH3B.12 | 1 | F | D | Y | V | T | . . . | G | F | S | D |
| CH3B.13 | 1 | 1 | D | Y | V | T | . . . | G | F | S | D |
| CH3B.14 | 1 | F | K | D | V | T | . . . | G | F | F | D |
| CH3B.15 | 1 | F | D | L | V | T | . . . | G | F | Y | D |
| CH3B.16 | 1 | 1 | D | Y | V | T | . . . | G | F | S | D |
| CH3B.17 | 1 | F | E | L | V | A | . . . | G | F | H | D |

TABLE 6
CH3C Register Positions and Mutations

| Se- | | | | | | | | | | | | | | | | | | | |
|---|---|---|---|---|---|---|---|---|---|---|---|---|---|---|---|---|---|---|---|
| quence | Seq. | | | | | | | | | | | | | | | | | | |
| name | group | 384 | 385 | 386 | 387 | 388 | 389 | 390 | 391 | . . . | 413 | 414 | 415 | 416 | 417 | 418 | 419 | 420 | 421 |
| Wild- | n/a | N | G | Q | P | E | N | N | Y | . . . | D | K | S | R | W | Q | Q | G | N |
| type | | | | | | | | | | | | | | | | | | | |
| CH3C.1 | | L | G | L | V | W | V | G | Y | . . . | A | K | S | T | W | Q | Q | G | W |
| CH3C.2 | | Y | G | T | V | W | S | H | Y | . . . | S | K | S | E | W | Q | Q | G | Y |
| CH3C.3 | | Y | G | T | E | W | S | Q | Y | . . . | E | K | S | D | W | Q | Q | G | H |
| CH3C.4 | | V | G | T | P | W | A | L | Y | . . . | L | K | S | E | W | Q | Q | G | W |
| CH3C. | 2 | Y | G | T | V | W | S | K | Y | . . . | S | K | S | E | W | Q | Q | G | F |
| 17 | | | | | | | | | | | | | | | | | | | |
| CH3C. | 1 | L | G | H | V | W | A | V | Y | . . . | P | K | S | T | W | Q | Q | G | W |
| 18 | | | | | | | | | | | | | | | | | | | |
| CH3C. | 1 | L | G | L | V | W | V | G | Y | . . . | P | K | S | T | W | Q | Q | G | W |
| 21 | | | | | | | | | | | | | | | | | | | |
| CH3C. | 1 | M | G | H | V | W | V | G | Y | . . . | D | K | S | T | W | Q | Q | G | W |
| 25 | | | | | | | | | | | | | | | | | | | |
| CH3C. | 1 | L | G | L | V | W | V | F | S | . . . | P | K | S | T | W | Q | Q | G | W |
| 34 | | | | | | | | | | | | | | | | | | | |
| CH3C. | 2 | Y | G | T | E | W | S | S | Y | . . . | T | K | S | E | W | Q | Q | G | F |
| 35 | | | | | | | | | | | | | | | | | | | |
| CH3C. | 2 | Y | G | T | E | W | S | N | Y | . . . | S | K | S | E | W | Q | Q | G | F |
| 44 | | | | | | | | | | | | | | | | | | | |
| CH3C. | 1/2 | L | G | H | V | W | V | G | Y | . . . | S | K | S | E | W | Q | Q | G | W |
| 51 | | | | | | | | | | | | | | | | | | | |
| CH3C. | 1 | L | G | H | V | W | V | A | T | . . . | P | K | S | T | W | Q | Q | G | W |
| 3.1-3 | | | | | | | | | | | | | | | | | | | |
| CH3C. | 1 | L | G | P | V | W | V | H | T | . . . | P | K | S | T | W | Q | Q | G | W |
| 3.1-9 | | | | | | | | | | | | | | | | | | | |
| CH3C. | 1 | L | G | H | V | W | V | D | Q | . . . | P | K | S | T | W | Q | Q | G | W |
| 3.2-5 | | | | | | | | | | | | | | | | | | | |
| CH3C. | 1 | L | G | H | V | W | V | N | Q | . . . | P | K | S | T | W | Q | Q | G | W |
| 3.2- | | | | | | | | | | | | | | | | | | | |
| 19 | | | | | | | | | | | | | | | | | | | |
| CH3C. | 1 | L | G | H | V | W | V | N | F | . . . | P | K | S | T | W | Q | Q | G | W |
| 3.2-1 | | | | | | | | | | | | | | | | | | | |
| CH3C. | | W | G | F | V | W | S | T | Y | . . . | P | K | S | N | W | Q | Q | G | F |
| 3.4-1 | | | | | | | | | | | | | | | | | | | |
| CH3C. | | W | G | H | V | W | S | T | Y | . . . | P | K | S | N | W | Q | Q | G | Y |
| 3.4- | | | | | | | | | | | | | | | | | | | |
| 19 | | | | | | | | | | | | | | | | | | | |
| CH3C. | | L | G | H | V | W | V | E | Q | . . . | P | K | S | T | W | Q | Q | G | W |
| 3.2-3 | | | | | | | | | | | | | | | | | | | |
| CH3C. | | L | G | H | V | W | V | G | V | . . . | P | K | S | T | W | Q | Q | G | W |
| 3.2- | | | | | | | | | | | | | | | | | | | |
| 14 | | | | | | | | | | | | | | | | | | | |
| CH3C. | | L | G | H | V | W | V | H | T | . . . | P | K | S | T | W | Q | Q | G | W |
| 3.2- | | | | | | | | | | | | | | | | | | | |
| 24 | | | | | | | | | | | | | | | | | | | |
| CH3C. | | W | G | T | V | W | G | T | Y | | P | K | S | N | W | Q | Q | G | Y |
| 3.4- | | | | | | | | | | | | | | | | | | | |
| 26 | | | | | | | | | | | | | | | | | | | |
| CH3C. | | L | G | H | V | W | V | G | T | | P | K | S | T | W | Q | Q | G | W |
| 3.2- | | | | | | | | | | | | | | | | | | | |
| 17 | | | | | | | | | | | | | | | | | | | |

### Generation of Phage-Display Libraries

[0288] A DNA template coding for the wild-type human Fc sequence was synthesized and incorporated into a phagemid vector. The phagemid vector contained an ompA or pelB leader sequence, the Fc insert fused to c-Myc and 6×His epitope tags, and an amber stop codon followed by M13 coat protein pIII.

[0289] Primers containing “NNK” tricodons at the corresponding positions for randomization were generated, where N is any DNA base (i.e., A, C, G, or T) and K is either G or T. Alternatively, primers for “soft” randomization were used, where a mix of bases corresponding to 70% wild-type base and 10% of each of the other three bases was used for each randomization position. Libraries were generated by performing PCR amplification of fragments of the Fc region corresponding to regions of randomization and then assembled using end primers containing SfiI restriction sites, then digested with SfiI and ligated into the phagemid vectors. Alternatively, the primers were used to conduct Kunkel mutagenesis. Methods of performing Kunkel mutagenesis will be known to one of skill in the art. The ligated products or Kunkel products were transformed into electrocompetent E. coli cells of strain TG1 (obtained from Lucigen®). The E. coli cells were infected with M13K07 helper phage after recovery and grown overnight, after which library phage were precipitated with 5% PEG/NaCl, resuspended in 15% glycerol in PBS, and frozen until use. Typical library sizes ranged from about 10⁹ to about 10¹¹ transformants. Fc-dimers were displayed on phage via pairing between pIII-fused Fc and soluble Fc not attached to pIII (the latter being generated due to the amber stop codon before pIII).

### Generation of Yeast-Display Libraries

[0290] A DNA template coding for the wild-type human Fc sequence was synthesized and incorporated into a yeast display vector. For CH2 and CH3 libraries, the Fc polypeptides were displayed on the Aga2p cell wall protein. Both vectors contained prepro leader peptides with a Kex2 cleavage sequence, and a c-Myc epitope tag fused to the terminus of the Fc.

[0291] Yeast display libraries were assembled using methods similar to those described for the phage libraries, except that amplification of fragments was performed with primers containing homologous ends for the vector. Freshly prepared electrocompetent yeast (i.e., strain EBY100) were electroporated with linearized vector and assembled library inserts. Electroporation methods will be known to one of skill in the art. After recovery in selective SD-CAA media, the yeast were grown to confluence and split twice, then induced for protein expression by transferring to SG-CAA media. Typical library sizes ranged from about 10⁷ to about 10⁹ transformants. Fc-dimers were formed by pairing of adjacently displayed Fc monomers.

### General Methods for Phage Selection

[0292] Phage methods were adapted from Phage Display: A Laboratory Manual (Barbas, 2001). Additional protocol details can be obtained from this reference.

[0293] Plate Sorting Methods

[0294] Human TfR target was coated on MaxiSorpx microtiter plates (typically 200 μL at 1-10 μg/mL in PBS) overnight at 4° C. All binding was done at room temperature unless otherwise specified. The phage libraries were added into each well and incubated overnight for binding. Microtiter wells were washed extensively with PBS containing 0.05% Tween® 20 (PBST) and bound phage were eluted by incubating the wells with acid (typically 50 mM HCl with 500 mM KCl, or 100 mM glycine, pH 2.7) for 30 minutes. Eluted phage were neutralized with 1 M Tris (pH 8) and amplified using TG1 cells and M13/K07 helper phage and grown overnight at 37° C. in 2YT media containing 50 μg/mL carbenacillin and 50 ug/mL Kanamycin. The titers of phage eluted from a target-containing well were compared to titers of phage recovered from a non-target-containing well to assess enrichment. Selection stringency was increased by subsequently decreasing the incubation time during binding and increasing washing time and number of washes.

[0295] Bead Sorting Methods

[0296] Human TfR target was biotinylated through free amines using NHS-PEG4-Biotin (obtained from Pierce™). For biotinylation reactions, a 3- to 5-fold molar excess of biotin reagent was used in PBS. Reactions were quenched with Tris followed by extensive dialysis in PBS. The biotinylated target was immobilized on streptavidin-coated magnetic beads, (i.e., M280-streptavidin beads obtained Thermo Fisher). The phage display libraries were incubated with the target-coated beads at room temperature for 1 hour. The unbound phage were then removed and beads were washed with PBST. The bound phage were eluted by incubating with 50 mM HCl containing 500 mM KCl (or 0.1 M glycine, pH 2.7) for 30 minutes, and then neutralized and propagated as described above for plate sorting.

[0297] After three to five rounds of panning, single clones were screened by either expressing Fc on phage or solubly in the E. coli periplasm. Such expression methods will be known to one of skill in the art. Individual phage supernatants or periplasmic extracts were exposed to blocked ELISA plates coated with target or a negative control and were subsequently detected using HRP-conjugated goat anti-Fc (obtained from Jackson Immunoresearch) for periplasmic extracts or anti-M13 (GE Healthcare) for phage, and then developed with TMB reagent (obtained from Thermo Fisher). Wells with OD₄₅₀ values greater than around 5-fold over background were considered positive clones and sequenced, after which some clones were expressed either as a soluble Fc fragment or fused to Fab fragments.

### General Methods for Yeast Selection

[0298] Bead Sorting (Magnetic-Assisted Cell Sorting (MACS)) Methods

[0299] MACS and FACS selections were performed similarly to as described in Ackerman, et al. 2009 Biotechnol. Prog. 25(3), 774. Streptavidin magnetic beads (e.g., M-280 streptavidin beads from ThermoFisher) were labeled with biotinylated target and incubated with yeast (typically 5-10× library diversity). Unbound yeast were removed, the beads were washed, and bound yeast were grown in selective media and induced for subsequent rounds of selection.

[0300] Bead Sorting (Magnetic-Assisted Cell Sorting (MACS)) Methods

[0301] Yeast were labeled with anti-c-Myc antibody to monitor expression and biotinylated target (concentration varied depending on the sorting round). In some experiments, the target was pre-mixed with streptavidin-Alexa Fluor® 647 in order to enhance the avidity of the interaction. In other experiments, the biotinylated target was detected after binding and washing with streptavidin-Alexa Fluor® 647. Singlet yeast with binding were sorted using a FACS Aria III cell sorter. The sorted yeast were grown in selective media then induced for subsequent selection rounds.

[0302] After an enriched yeast population was achieved, yeast were plated on SD-CAA agar plates and single colonies were grown and induced for expression, then labeled as described above to determine their propensity to bind to the target. Positive single clones were subsequently sequenced for binding target, after which some clones were expressed either as a soluble Fc fragment or as fused to Fab fragments.

### General Methods for Screening

[0303] Screening by ELISA

[0304] Clones were selected from panning outputs and grown in individual wells of 96-well deep-well plates. The clones were either induced for periplasmic expression using autoinduction media (obtained from EMD Millipore) or infected with helper phage for phage-display of the individual Fc variants on phage. The cultures were grown overnight and spun to pellet E. coli. For phage ELISA, phage containing supernatant was used directly. For periplasmic expression, pellets were resuspended in 20% sucrose, followed by dilution at 4:1 with water, and shaken at 4° C. for 1 hour. Plates were spun to pellet the solids and supernatant was used in the ELISA.

[0305] ELISA plates were coated with target, typically at 0.5 mg/mL overnight, then blocked with 1% BSA before addition of phage or periplasmic extracts. After a 1-hour incubation and washing off unbound protein, HRP-conjugated secondary antibody was added (i.e., anti-Fc or anti-M13 for soluble Fc or phage-displayed Fc, respectively) and incubated for 30 minutes. The plates were washed again, and then developed with TMB reagent and quenched with 2N sulfuric acid. Absorbance at 450 nm was quantified using a plate reader (BioTek®) and binding curves were plotted using Prism software where applicable. Absorbance signal for tested clones was compared to negative control (phage or paraplasmic extract lacking Fc). In some assays, soluble holo-transferrin was added during the binding step, typically at significant molar excess (greater than 10-fold excess).

[0306] Screening by Flow Cytometry

[0307] Fc variant polypeptides (expressed either on phage, in periplasmic extracts, or solubly as fusions to Fab fragments) were added to cells in 96-well V-bottom plates (about 100,000 cells per well in PBS+1% BSA (PBSA)), and incubated at 4° C. for 1 hour. The plates were subsequently spun and the media was removed, and then the cells were washed once with PBSA. The cells were resuspended in PBSA containing secondary antibody (goat anti-human-IgG-Alexa Fluor® 647 (obtained from Thermo Fisher)). After 30 minutes, the plates were spun and the media was removed, the cells were washed 1-2 times with PBSA, and then the plates were read on a flow cytometer (i.e., a FACSCanto™ II flow cytometer). Median fluorescence values were calculated for each condition using FlowJo software and binding curves were plotted with Prism software.

### CH2A2 Clone Generation and Characterization

[0308] Selections with CH2A2 Library Against Transferrin Receptor (TfR)

[0309] Phage and yeast libraries against CH2A2 were panned and sorted against TfR as described above. Clones binding human and/or cynomolgous (cyno) TfR were identified in ELISA assays, as described in the section titled “Screening by ELISA” above, after four rounds of phage panning. Sequences of representative clones fell into two groups: group 1 containing 15 unique sequences (i.e., SEQ ID NOS:47-61) and group 2 containing a single unique sequence (i.e., SEQ ID NO:62). Group 1 sequences had a conserved Glu-Trp motif at positions 287-288. No consensus appeared at any other positions, though position 285 favored Arg and position 286 favored Trp or Tyr.

[0310] Characterization of CH2A2 Clones

[0311] Individual CH2A2 variants were expressed on the surface of phage and assayed for binding to human TfR, cyno TfR, or an irrelevant control by ELISA. Expression of Fc was confirmed by ELISA against anti-Myc antibody 9E10, which bound to the C-terminal c-Myc epitope tag. The data for four representative clones, CH2A2.5, CH2A2.1, CH2A2.4, and CH2A2.16, demonstrated that all were well-expressed and bound to human TfR, while none bound to the irrelevant control. The three clones from group 1 also bound to cyno TfR, whereas the one clone from group 2 (i.e., clone 2A2.16) was specific for human TfR.

[0312] In a second assay, the concentration of phage was kept constant (i.e., at the approximate EC₅₀) and a varying concentration of a soluble competitor, either holo-transferrin or human TfR, was added. It was found that binding was not appreciably impacted by addition of holo-transferrin at concentrations up to 5 μM. Conversely, soluble human TfR could compete for binding to surface-adsorbed human TfR, indicating a specific interaction.

[0313] The CH2A2 variants are expressed as Fc fusions to anti-BACE1 Fab fragments by cloning into an expression vector containing an anti-BACE1 variable region sequence. After expression in 293 or CHO cells, the resulting CH2A2-Fab fusions were purified by Protein A and size-exclusion chromatography, and then assayed for binding using ELISAs, surface plasmon resonance (SPR; i.e., using a Biacore™ instrument), biolayer inferometry (i.e., using an Octetx RED system), cell binding (e.g., flow cytometry), and other methods described herein. Additionally, the resulting polypeptide-Fab fusions are characterized for stability by thermal melting, freeze-thaw, and heat-accelerated denaturation.

[0314] Additional Engineering of CH2A2 Clones

[0315] Two secondary libraries were constructed to enhance the binding affinity of the initial hits against human and cyno TfR. The first library was generated based on the group 1 clones. The conserved EW motif at positions 287-288 was held invariant, and the semi-conserved R at position 285 was mutated using soft randomization. The other library positions (i.e., positions 274, 276, 283, 286, 289, and 290) were mutated by saturation mutagenesis. The second library was constructed based on the group 2 clone. This library was generated by soft randomization of the original CH2A2 library positions, but used clone 2A2.16 (SEQ ID NO:62) as the template (rather than wild-type Fc). Both libraries were constructed for phage and yeast display using methods described above.

[0316] The libraries were screened using methods described above and several clones that bound human TfR by ELISA were identified (Table 1).

### CH2C Clone Generation and Characterization

[0317] Selections with CH2C Library Against Transferrin Receptor (TfR)

[0318] Phage and yeast libraries against CH2C were panned and sorted against TfR as described above. Clones binding human and/or cynomolgous (cyno) TfR were identified in ELISA assays, as described in the section titled “Screening by ELISA” above, after four rounds of phage panning (i.e., group 1 and 4 clones), and additional clones were identified after four or five yeast sort rounds (i.e., group 2 and 3 clones), by yeast binding assays as described in the section titled “General Methods for Yeast Selection” above. Sequences of representative clones fell into four groups: group 1 containing 16 unique sequences (i.e, SEQ ID NOS:63-78), group 2 containing 4 unique sequences (i.e., SEQ ID NOS:79-82), group 3 containing 2 unique sequences (i.e., SEQ ID NOS:83-84), and group 4 containing a single sequence (i.e., SEQ ID NO:85) (Table 2). The group 1 sequences had a semi-conserved Pro at position 266, a semi-conserved Pro at position 269, a conserved Pro at position 270, a semi-conserved Trp at position 271, a semi-conserved Glu at position 295, a conserved Tyr at position 297, and little specific preference at other library positions. The group 2 sequences had a conserved Met at position 266, a semi-conserved L at position 267, a conserved Pro at position 269, a conserved Val at position 270, a semi-conserved Pro at position 271, a semi-conserved Thr at position 295, a conserved His at position 297, and a conserved Pro at position 299. The two group 3 sequences only differed at position 295, where either a Val or Leu was present. Group 4 consisted of a single clone (i.e., CH2C.23) with a sequence as indicated in SEQ ID NO:85.

[0319] Characterization of CH2C Clones

[0320] The CH2C variants were expressed as Fc fusions to Fab fragments by cloning into an expression vector containing an anti-BACE1 benchmark variable region sequence. After expression in 293 or CHO cells, the resulting polypeptide-Fab fusions were purified by Protein A and size-exclusion chromatography, then assayed for binding to human or cyno TfR. The group 4 clone CH2C.23 competed with holo-transferrin. Clones belonging to sequence group 1 were tested in binding titrations against human and cyno TfR. Representative clones from other sequence groups were tested on phage for binding in the presence or absence of holo-Tf, and clone CH2C.7 was tested for binding to human TfR in the presence of holo-transferrin by biolayer interferometry (i.e., using an Octet® RED system). Most clones showed some cross-reactivity to cyno TfR, and except for clone CH2C.23, the clones that were tested did not compete with holo-Tf.

### CH2D Clone Generation and Characterization

[0321] Selections with CH2D Library Against Transferrin Receptor (TfR)

[0322] Phage libraries against CH2D were panned against TfR as described above. Clones binding human and/or cyno TfR were identified in ELISA assays, as described in the section titled “Screening by ELISA” above. Five unique clones were identified which were grouped into two sequence families of 2 and 3 sequences, respectively (Table 3). Sequence group 1 (i.e., clones CH2D.1 (SEQ ID NO:86) and CH2D.2 (SEQ ID NO:87)) had a conserved VPPXM (SEQ ID NO:111) motif at positions 268-272, an SLTS (SEQ ID NO:112) motif at positions 291-295, and V at position 300. Mutations at position 267 were not included in the design and were likely due to PCR error or recombination. Sequence group 2 (i.e., clones CH2D.3 (SEQ ID NO:88), CH2D.4 (SEQ ID NO:89), and CH2D.5 (SEQ ID NO:90)) had a conserved D at position 268, a semi-conserved D at position 269, a conserved W at position 270, a semi-conserved E at position 271, a conserved aromatic (W or Y) at position 272, a conserved PW motif at positions 291-292, and a conserved W at position 300.

[0323] Characterization and Additional Engineering of CH2D Clones

[0324] CH2D variants were expressed as fusions to Fab fragments by cloning into an expression vector containing an anti-BACE1 variable region sequence. After expression in 293 or CHO cells, the resulting polypeptide-Fab fusions were purified by Protein A and size-exclusion chromatography, then assayed for binding to cyno and human TfR in the presence or absence of holo-Tf using methods previously described herein.

### CH2E Clone Generation and Characterization

[0325] Selections with CH2E3 Library Against Transferrin Receptor (TfR)

[0326] Phage libraries against CH2E3 were panned against TfR as described above. Clones binding human and/or cyno TfR were identified in ELISA assays, as described in the section titled “Screening by ELISA” above. Three sequence groups were identified from 5 sequences, though two of the groups only consisted of one unique sequence each (Table 4). Sequence group 2, which had 3 unique sequences (i.e., clones CH2E3.2 (SEQ ID NO:92), CH2E3.3 (SEQ ID NO:93), and CH2E3.4 (SEQ ID NO:94)), had a semi-conserved Val at position 272, a conserved Gly at position 274, a conserved Arg at position 276, a conserved Arg at position 322, a conserved Ser at positions 324 and 326, a conserved Trp at position 330, and an Arg or Lys at position 331.

[0327] Characterization and Additional Engineering of CH2E3 Clones

[0328] CH2E3 variants were expressed as fusions to Fab fragments by cloning into an expression vector containing an anti-BACE1 benchmark variable region sequence. After expression in 293 or CHO cells, the resulting polypeptide-Fab fusions were purified by Protein A and size-exclusion chromatography, then assayed for binding to cyno and human TfR in the presence or absence of holo-Tf using methods for binding previously described herein.

### CH3B Clone Generation and Characterization

[0329] Selections with CH3B Library Against Transferrin Receptor (TfR)

[0330] Phage and yeast libraries against CH3B were panned and sorted against TfR as described above. Clones binding human and/or cyno TfR were identified in ELISA assays, as described in the section titled “Screening by ELISA” above, after four rounds of phage panning, and additional clones were identified after four or five yeast sort rounds, by yeast binding assays as described in the section titled “General Methods for Yeast Selection” above. All 17 clones (i.e., SEQ ID NOS:30-46) identified from both phage and yeast had related sequences; the sequences had a semi-conserved Phe at position 345, a semi-conserved negatively charged Asp or Glu at position 346, a semi-conserved Thr at position 349, a conserved G at position 437, a conserved Phe at position 438, a semi-conserved His at position 439, and a conserved Asp at position 440. Several clones had a T350I mutation, which was not a position intentionally mutated in the library design, but presumably was introduced by recombination or PCR error.

[0331] Characterization of CH3B Clones

[0332] Two representative clones, CH3B.11 (SEQ ID NO:40) and CH3B.12 (SEQ ID NO:41), were expressed on the surface of phage and tested for binding to human and cyno TfR in the presence or absence of holo-Tf. Neither clone was affected by the addition of holo-Tf. Additionally, the CH3B variants were expressed as fusions to Fab fragments by cloning into an expression vector containing an anti-BACE1 variable region sequence. After expression in 293 or CHO cells, the resulting polypeptide-Fab fusions were purified by Protein A and size-exclusion chromatography, then assayed for binding to human or cyno TfR. All showed specific binding to both orthologs.

[0333] Additional Engineering of CH3B Clones

[0334] Additional engineering methods, similar to those described above for CH2A2 for the design and screening of additional libraries, were used to improve the affinity of CH3B clones. In particular, several series of four to seven residue patches near the paratope were selected for additional diversification. Clone CH3B.12 (SEQ ID NO:41) was used as a starting point; the residues selected for saturation (i.e., NNK) mutagenesis were as follows:

CH3B-patch1: amino acid positions 354, 355, 356, 358, 359, 360, and 361;
CH3B-patch2: amino acid positions 348, 433, 434, and 436;
CH3B-patch3: amino acid positions 352, 441, 444, 445, 446, and 447;
CH3B-patch4: amino acid positions 342, 344, 370, 401, and 403; and
CH3B-patch5: amino acid positions 382, 384, 385, 420, 421, and 422.

[0335] The libraries were generated using PCR mutagenesis and put into yeast and phage as described in the sections titled “Generation of Phage-Display Libraries” and “Generation of Yeast-Display Libraries” above. The libraries were screened using methods described above and several clones that bound human TfR by ELISA were identified (Table 5).

### CH3C Clone Generation and Characterization

[0336] Selections with CH3C Library Against Transferrin Receptor (TfR)

[0337] Yeast libraries against CH3C were panned and sorted against TfR as described above. Population enrichment FACS was performed for the first three sort rounds. After an additional two rounds of sorting, single clones were sequenced and four unique sequences (i.e., clones CH3C.1 (SEQ ID NO:4), CH3C.2 (SEQ ID NO:5), CH3C.3 (SEQ ID NO:6), and CH3C.4 (SEQ ID NO:7)) were identified (Table 6). These sequences had a conserved Trp at position 388, and all had an aromatic residue (i.e., Trp, Tyr, or His) at position 421. There was a great deal of diversity at other positions.

[0338] Characterization of First Generation CH3C Clones

[0339] The four clones selected from the CH3C library were expressed as Fc fusions to Fab fragments in CHO or 293 cells, and purified by Protein A and size-exclusion chromatography, and then screened for binding to cyno and human TfR in the presence or absence of holo-Tf by ELISA. The clones all bound to human TfR and the binding was not affected by the addition of excess (5 μM) holo-Tf. However, the clones did not bind appreciably to cyno TfR. Clones were also tested for binding to 293F cells, which endogenously express human TfR. While the clones bound to 293F cells, the overall binding was substantially weaker than the high-affinity positive control.

[0340] Next it was tested whether clone CH3C.3 could internalize in TfR-expressing cells. Adherent HEK293 cells were grown in 96-well plates to about 80% confluence, media was removed, and samples were added at 1 μM concentrations: CH3C.3 anti-TfR benchmark positive control antibody (Ab204), anti-BACE1 benchmark negative control antibody (Ab107), and human IgG isotype control (obtained from Jackson Immunoresearch). The cells were incubated at 37° C. and 8% CO₂ concentration for 30 minutes, then washed, permeabilized with 0.1% Triton™ X-100, and stained with anti-human-IgG-Alexa Fluor® 488 secondary antibody. After additional washing, the cells were imaged under a high content fluorescence microscope (i.e., an Opera Phenix™ system), and the number of puncta per cell was quantified. At 1 clone CH3C.3 showed a similar propensity for internalization to the positive anti-TfR control, while the negative controls showed no internalization.

[0341] Secondary Engineering of CH3C Clones

[0342] Additional libraries were generated to improve the affinity of the initial CH3C hits against human TfR, and to attempt to introduce binding to cyno TfR. A soft randomization approach was used, wherein DNA oligos were generated to introduce soft mutagenesis based on each of the original four hits. The first portion of the register (WESXGXXXXXYK) and the second portion of the register (TVXKSXWQQGXV) were built via separate fragments, so the soft randomized registers were shuffled during PCR amplification (e.g., the first portion of the register from clone CH3C.1 was mixed with the second portion of the register from clones CH3C.1, CH3C.2, CH3C.3, and CH3C.4, and so forth). The fragments were all mixed and then introduced into yeast for surface expression and selection.

[0343] After one round of MACS and three rounds of FACS, individual clones were sequenced (clones CH3C.17 (SEQ ID NO:8), CH3C.18 (SEQ ID NO:9), CH3C.21 (SEQ ID NO:10), CH3C.25 (SEQ ID NO:11), CH3C.34 (SEQ ID NO:12), CH3C.35 (SEQ ID NO:13), CH3C.44 (SEQ ID NO:14), and CH3C.51 (SEQ ID NO:15)). The selected clones fell into two general sequence groups (Table 6). Group 1 clones (i.e., clones CH3C.18, CH3C.21, CH3C.25, and CH3C.34) had a semi-conserved Leu at position 384, a Leu or His at position 386, a conserved and a semi-conserved Val at positions 387 and 389, respectively, and a semi-conserved P-T-W motif at positions 413, 416, and 421, respectively. Group 2 clones had a conserved Tyr at position 384, the motif TXWSX at positions 386-390, and the conserved motif S/T-E-F at positions 413, 416, and 421, respectively. Clones CH3C.18 and CH3.35 were used in additional studies as representative members of each sequence group. It was noted that clone CH3C.51 had the first portion of its register from group 1 and the second portion of its register from group 2.

[0344] Binding Characterization of CH3C Clones from the Soft Mutagenesis Library

[0345] Clones from the soft mutagenesis library were reformatted as Fc-Fab fusion polypeptides and expressed and purified as described above. These variants had improved ELISA binding to human TfR as compared to the top clone from the initial library selections (CH3C.3), and also did not compete with holo-Tf. The EC₅₀ values were not appreciably affected beyond the margin of error of the experiment by the presence or absence of holo-Tf.

[0346] Notably, clone CH3C.35 bound to human TfR about as well as the high affinity anti-TfR control antibody Ab204. The clones selected from the soft randomization library also had improved cell binding to 293F cells. In a similar cell binding assay, these clones were tested for binding to CHO-K1 cells that stably express high levels of human or cyno TfR on their surface. The clones selected from the soft randomization library bound to cells expressing human TfR as well as cyno TfR and did not bind to the parental CHO-K1 cells. The magnitude and binding EC₅₀ values were substantially lower for cyno TfR as compared to human TfR.

[0347] Epitope Mapping

[0348] To determine whether the engineered CH3C Fc regions bound to the apical domain of TfR, TfR apical domain (SEQ ID NOS:96 and 97 for human and cyno, respectively) was expressed on the surface of phage. To properly fold and display the apical domain, one of the loops had to be truncated and the sequence needed to be circularly permuted; the sequences expressed on phage are identified as SEQ ID NOS:98 and 99 for human and cyno, respectively. Clones CH3C.18 and CH3C.35 were coated on ELISA plates and the previously described phage ELISA protocol was followed. Briefly, after washing and blocking with 1% PBSA, dilutions of phage displaying were added and incubated at room temperature for 1 hour. The plates were subsequently washed and anti-M13-HRP was added, and after additional washing the plates were developed with TMB substrate and quenched with 2N H2504. Both CH3C.18 and CH3C.35 bound to the apical domain in this assay.

[0349] Since binding to cyno TfR was known to be much weaker than binding to human TfR, it was hypothesized that one or more of the amino acid differences between cyno and human apical domains was likely responsible for the binding difference. Therefore, a series of six point mutations was made in the human TfR apical domain where the human residue was replaced with the corresponding cyno residue. These mutants were displayed on phage and the phage concentrations were normalized by OD₂₆₈ and binding to CH3C.18 and CH3C.35 was tested by phage ELISA titration. Capture on anti-Myc antibody 9E10 showed that display levels for all mutants were similar. Binding to the human TfR mutations clearly showed a strong effect of the R435G mutation, which suggested that this residue is a key part of the epitope and is negatively impacted by the cyno residue at this position. The G435R mutation was made on phage-displayed cyno apical domain and it was shown that this mutation dramatically improved binding to cyno apical domain. These results show that the CH3C clones bound to the apical domain of TfR and that position 435 was important for binding, while positions 474, 519, 591, 597, and 599 were significantly less important.

[0350] Paratope Mapping

[0351] To understand which residues in the Fc domain were most critical for TfR binding, a series of mutant CH3C.18 and CH3C.35 clones was created in which each mutant had a single position in the TfR-binding register mutated back to wild-type. The resulting variants were expressed recombinantly as CH3C Fc-Fab fusions and tested for binding to human or cyno TfR. For CH3C.35, positions 388 and 421 were absolutely critical for binding; reversion of either of these to wild-type completely ablated binding to human TfR. Surprisingly, reverting position 390 to wild-type provided a dramatic boost to cyno TfR binding, while having little effect on human binding. Conversely, the reversion of residue 390 to wild-type had little effect in CH3C.18, but in this variant reversion of positions 416 and 421 completely abolished binding to human TfR. In both variants, other single reversions had modest (detrimental) impact on human TfR binding, while in many cases binding to cyno TfR was abolished.

[0352] Additional Engineering to Improve Binding to Cyno TfR

[0353] Additional libraries were prepared to further increase the affinity of the CH3C variants for cyno TfR. These libraries were designed to be of less than about 10⁷ clones in terms of theoretical diversity, so that the full diversity space could be explored using yeast surface display. Four library designs were used; all libraries were generated using degenerate oligos with NNK or other degenerate codon positions, and amplified by overlap PCR, as described above.

[0354] The first library was based on the consensus of CH3C.35-like sequences. Here, positions 384-388 were held constant as YGTEW, while positions 389, 390, 413, 416, and 421 were mutated using saturation mutagenesis.

[0355] The second library was based on the consensus of CH3C.18-like sequences. Here, position 384 was restricted to Leu and Met, position 386 was restricted to Leu and His, position 387 was held constant as Val, position 388 was restricted to Trp and Gly, position 389 was restricted to Val and Ala, position 390 was fully randomized, position 391 was added to the register and fully randomized, position 413 was soft randomized, position 416 was fully randomized, and position 421 was restricted to aromatic amino acids and Leu.

[0356] The third library added new randomized positions to the library. Two versions were generated, one each with CH3C.18 and CH3C.35 as the starting register, and then additional positions were randomized by saturation mutagenesis: E153, E155, Y164, 5188, and Q192.

[0357] The fourth library held certain positions constant for CH3C.18 but allowed variation at other positions, with less bias than the consensus library. Positions 387, 388, and 413 were fixed, and positions 384, 386, 389, 390, and 416 were randomized by saturating mutagenesis; position 421 was mutated but restricted to aromatic residues and Leu.

[0358] The libraries were selected in yeast for four to five rounds against cynoTfR and single clones were sequenced and converted to polypeptide-Fab fusions, as described above. The greatest enrichment in cynoTfR binding was observed from the second library (i.e., derivatives of the CH3C.18 parent), though there was also some loss in huTfR binding.

[0359] Binding Characteristics of CH3C Maturation Clones

[0360] Binding ELISAs were conducted with purified CH3C Fc-Fab fusion variants with human or cyno TfR coated on the plate, as described above. The variants from the CH3C.18 maturation library, CH3C3.2-1, CH3C.3.2-5, and CH3C.3.2-19, bound human and cyno TfR with approximately equivalent EC₅₀ values, whereas the parent clone CH3C.18, and CH3C.35, had greater than 10-fold better binding to human versus cyno TfR.

[0361] Next, it was tested whether the new polypeptides internalized in human and monkey cells. Using the protocol previously described above in the section titled “Characterization of first generation CH3C clones,” internalization in human HEK293 cells and rhesus LLC-MK2 cells was tested. The variants that similarly bound human and cyno TfR, CH3C.3.2-5 and CH3C.3.2-19, had significantly improved internalization in LLC-MK2 cells as compared with CH3C.35.

[0362] Additional Engineering of CH3C Clones

[0363] Additional engineering to further affinity mature clones CH3C.18 and CH3C.35 involved adding additional mutations to the backbone (i.e., non-register) positions that enhanced binding through direct interactions, second-shell interactions, or structure stabilization. This was achieved via generation and selection from an “NNK walk” or “NNK patch” library. The NNK walk library involved making one-by-one NNK mutations of residues that are near to the paratope. By looking at the structure of Fc bound to FcgRI (PDB ID: 4W4O), 44 residues near the original library register were identified as candidates for interrogation. Specifically, the following residues were targeted for NNK mutagenesis: K248, R255, Q342, R344, E345, Q347, T359, K360, N361, Q362, 5364, K370, E380, E382, S383, G385, Y391, K392, T393, D399, 5400, D401, 5403, K409, L410, T411, V412, K414, S415, Q418, Q419, G420, V422, F423, 5424, 5426, Q438, 5440, 5442, L443, 5444, P4458, G446, and K447. The 44 single point NNK libraries were generated using Kunkel mutagenesis, and the products were pooled and introduced to yeast via electroporation, as described above for other yeast libraries.

[0364] The combination of these mini-libraries (each of which had one position mutated, resulting in 20 variants) generated a small library that was selected using yeast surface display for any positions that lead to higher affinity binding. Selections were performed as described above, using TfR apical domain proteins. After three rounds of sorting, clones from the enriched yeast library were sequenced, and several “hot-spot” positions were identified where certain point mutations significantly improved the binding to apical domain proteins. For CH3C.35, these mutations included E380 (mutated to Trp, Tyr, Leu, or Gln) and 5415 (mutated to Glu). The sequences of the CH3C.35 single and combination mutants are set forth in SEQ ID NOS:21-23, 101-106, and 162-164. For CH3C.18, these mutations included E380 (mutated to Trp, Tyr, or Leu) and K392 (mutated to Gln, Phe, or His). The sequences of the CH3C.18 single mutants are set forth in SEQ ID NOS:107-112.

### Additional Maturation Libraries to Improve CH3C.35 Affinity

[0365] An additional library to identify combinations of mutations from the NNK walk library, while adding several additional positions on the periphery of these, was generated as described for previous yeast libraries. In this library, the YxTEWSS and TxxExxxxF motifs were kept constant, and six positions were completely randomized: E380, K392, K414, 5415, S424, and S426. Positions E380 and 5415 were included because they were “hot spots” in the NNK walk library. Positions K392, S424, and S426 were included because they make up part of the core that may position the binding region, while K414 was selected due to its adjacency to position 415.

[0366] This library was sorted, as previously described, with the cyno TfR apical domain only. The enriched pool was sequenced after five rounds, and the sequences of the CH3 regions of the identified unique clones are set forth in SEQ ID NOS:113-130.

Exploration of Acceptable Diversity within the Original Register and Hot Spots for CH3C.35.21

[0367] The next libraries were designed to explore the totality of acceptable diversity in the main binding paratope. The approach taken was similar to the NNK walk libraries. Each of the original register positions (384, 386, 387, 388, 389, 390, 413, 416, and 421) plus the two hot spots (380 and 415) were individually randomized with NNK codons to generate a series of single-position saturation mutagenesis libraries on yeast. In addition, each position was individually reverted to the wild-type residue, and these individual clones were displayed on yeast. It was noted that positions 380, 389, 390, and 415 were the only positions that retained substantial binding to TfR upon reversion to the wild-type residue (some residual but greatly diminished binding was observed for reversion of 413 to wild-type).

[0368] The single-position NNK libraries were sorted for three rounds against the human TfR apical domain to collect the top ˜5% of binders, and then at least 16 clones were sequenced from each library. The results indicate what amino acids at each position can be tolerated without significantly reducing binding to human TfR, in the context of the CH3C.35 clone. A summary is below:

### Position 380: Trp, Leu, or Glu;

### Position 384: Tyr or Phe;

[0369] Position 386: Thr only;
Position 387: Glu only;
Position 388: Trp only;
Position 389: Ser, Ala, or Val (although the wild type Asn residue seems to retain some binding, it did not appear following library sorting);

### Position 390: Ser or Asn;

### Position 413: Thr or Ser;

### Position 415: Glu or Ser;

[0370] Position 416: Glu only; and
Position 421: Phe only.

[0371] The above residues, when substituted into clone CH3C.35 as single changes or in combinations, represent paratope diversity that retains binding to TfR apical domain. Clones having mutations at these positions are shown in Table 7, and the sequences of the CH3 domains of these clones are set forth in SEQ ID NOS:102-106, 129, and 131-161.

TABLE 7
Exploration of Acceptable Diversity Within Register and
Hot Spot Positions for CH3C.35.21

| | 378 | 379 | 380 | 381 | 382 | 383 | 384 | 385 | 386 | 387 | 388 | 389 | 390 | 391 | 392 | 411 | 412 | 413 | 414 | 415 | 416 | 417 | 418 | 419 | 420 | 421 | 422 | 423 |
|---|---|---|---|---|---|---|---|---|---|---|---|---|---|---|---|---|---|---|---|---|---|---|---|---|---|---|---|---|
| Wild- | A | V | E | W | E | S | N | G | Q | P | E | N | N | Y | K | T | V | D | K | S | R | W | Q | Q | G | N | V | F |
| type | | | | | | | | | | | | | | | | | | | | | | | | | | | | |
| CH3C.35. | . | . | . | . | . | . | F | . | T | E | W | S | S | . | . | . | . | T | . | E | E | . | . | . | . | F | . | . |
| 20.1 | | | | | | | | | | | | | | | | | | | | | | | | | | | | |
| CH3C.35. | . | . | . | . | . | . | Y | . | T | E | W | A | S | . | . | . | . | T | . | E | E | . | . | . | . | F | . | . |
| 20.2 | | | | | | | | | | | | | | | | | | | | | | | | | | | | |
| CH3C.35. | . | . | . | . | . | . | Y | . | T | E | W | V | S | . | . | . | . | T | . | E | E | . | . | . | . | F | . | . |
| 20.3 | | | | | | | | | | | | | | | | | | | | | | | | | | | | |
| CH3C.35. | . | . | . | . | . | . | Y | . | T | E | W | S | S | . | . | . | . | S | . | E | E | . | . | . | . | F | . | . |
| 20.4 | | | | | | | | | | | | | | | | | | | | | | | | | | | | |
| CH3C.35. | . | . | . | . | . | . | F | . | T | E | W | A | S | . | . | . | . | T | . | E | E | . | . | . | . | F | . | . |
| 20.5 | | | | | | | | | | | | | | | | | | | | | | | | | | | | |
| CH3C.35. | . | . | . | . | . | . | F | . | T | E | W | V | S | . | . | . | . | T | . | E | E | . | . | . | . | F | . | . |
| 20.6 | | | | | | | | | | | | | | | | | | | | | | | | | | | | |
| CH3C.35. | . | . | W | . | . | . | F | . | T | E | W | S | S | . | . | . | . | T | . | E | E | . | . | . | . | F | . | . |
| 21.A.1 | | | | | | | | | | | | | | | | | | | | | | | | | | | | |
| CH3C.35. | . | . | W | . | . | . | Y | . | T | E | W | A | S | . | . | . | . | T | . | E | E | . | . | . | . | F | . | . |
| 21.A.2 | | | | | | | | | | | | | | | | | | | | | | | | | | | | |
| CH3C.35. | . | . | W | . | . | . | Y | . | T | E | W | V | S | . | . | . | . | T | . | E | E | . | . | . | . | F | . | . |
| 21.A.3 | | | | | | | | | | | | | | | | | | | | | | | | | | | | |
| CH3C.35. | . | . | W | . | . | . | Y | . | T | E | W | S | S | . | . | . | . | S | . | E | E | . | . | . | . | F | . | . |
| 21.A.4 | | | | | | | | | | | | | | | | | | | | | | | | | | | | |
| CH3C.35. | . | . | W | . | . | . | F | . | T | E | W | A | S | . | . | . | . | T | . | E | E | . | . | . | . | F | . | . |
| 21.A.5 | | | | | | | | | | | | | | | | | | | | | | | | | | | | |
| CH3C.35. | . | . | W | . | . | . | F | . | T | E | W | V | S | . | . | . | . | T | . | E | E | . | . | . | . | F | . | . |
| 21.A.6 | | | | | | | | | | | | | | | | | | | | | | | | | | | | |
| CH3C.35. | . | . | . | . | . | . | F | . | T | E | W | S | . | . | . | . | . | T | . | E | E | . | . | . | . | F | . | . |
| 23.1 | | | | | | | | | | | | | | | | | | | | | | | | | | | | |
| CH3C.35. | . | . | . | . | . | . | Y | . | T | E | W | A | . | . | . | . | . | T | . | E | E | . | . | . | . | F | . | . |
| 23.2 | | | | | | | | | | | | | | | | | | | | | | | | | | | | |
| CH3C.35. | . | . | . | . | . | . | Y | . | T | E | W | V | . | . | . | . | . | T | . | E | E | . | . | . | . | F | . | . |
| 23.3 | | | | | | | | | | | | | | | | | | | | | | | | | | | | |
| CH3C.35. | . | . | . | . | . | . | Y | . | T | E | W | S | . | . | . | . | . | S | . | E | E | . | . | . | . | F | . | . |
| 23.4 | | | | | | | | | | | | | | | | | | | | | | | | | | | | |
| CH3C.35. | . | . | . | . | . | . | F | . | T | E | W | A | . | . | . | . | . | T | . | E | E | . | . | . | . | F | . | . |
| 23.5 | | | | | | | | | | | | | | | | | | | | | | | | | | | | |
| CH3C.35. | . | . | . | . | . | . | F | . | T | E | W | V | . | . | . | . | . | T | . | E | E | . | . | . | . | F | . | . |
| 23.6 | | | | | | | | | | | | | | | | | | | | | | | | | | | | |
| CH3C.35. | . | . | W | . | . | . | F | . | T | E | W | S | . | . | . | . | . | T | . | E | E | . | . | . | . | F | . | . |
| 24.1 | | | | | | | | | | | | | | | | | | | | | | | | | | | | |
| CH3C.35. | . | . | W | . | . | . | Y | . | T | E | W | A | . | . | . | . | . | T | . | E | E | . | . | . | . | F | . | . |
| 24.2 | | | | | | | | | | | | | | | | | | | | | | | | | | | | |
| CH3C.35. | . | . | W | . | . | . | Y | . | T | E | W | V | . | . | . | . | . | T | . | E | E | . | . | . | . | F | . | . |
| 24.3 | | | | | | | | | | | | | | | | | | | | | | | | | | | | |
| CH3C.35. | . | . | W | . | . | . | Y | . | T | E | W | S | . | . | . | . | . | S | . | E | E | . | . | . | . | F | . | . |
| 24.4 | | | | | | | | | | | | | | | | | | | | | | | | | | | | |
| CH3C.35. | . | . | W | . | . | . | F | . | T | E | W | A | . | . | . | . | . | T | . | E | E | . | . | . | . | F | . | . |
| 24.5 | | | | | | | | | | | | | | | | | | | | | | | | | | | | |
| CH3C.35. | . | . | W | . | . | . | F | . | T | E | W | V | . | . | . | . | . | T | . | E | E | . | . | . | . | F | . | . |
| 24.6 | | | | | | | | | | | | | | | | | | | | | | | | | | | | |
| CH3C.35. | . | . | L | . | . | . | F | . | T | E | W | S | S | . | . | . | . | T | . | E | E | . | . | . | . | F | . | . |
| 21.17.1 | | | | | | | | | | | | | | | | | | | | | | | | | | | | |
| CH3C.35. | . | . | L | . | . | . | Y | . | T | E | W | A | S | . | . | . | . | T | . | E | E | . | . | . | . | F | . | . |
| 21.17.2 | | | | | | | | | | | | | | | | | | | | | | | | | | | | |
| CH3C.35. | . | . | L | . | . | . | Y | . | T | E | W | V | S | . | . | . | . | T | . | E | E | . | . | . | . | F | . | . |
| 21.17.3 | | | | | | | | | | | | | | | | | | | | | | | | | | | | |
| CH3C.35. | . | . | L | . | . | . | Y | . | T | E | W | S | S | . | . | . | . | S | . | E | E | . | . | . | . | F | . | . |
| 21.17.4 | | | | | | | | | | | | | | | | | | | | | | | | | | | | |
| CH3C.35. | . | . | L | . | . | . | F | . | T | E | W | A | S | . | . | . | . | T | . | E | E | . | . | . | . | F | . | . |
| 21.17.5 | | | | | | | | | | | | | | | | | | | | | | | | | | | | |
| CH3C.35. | . | . | L | . | . | . | F | . | T | E | W | V | S | . | . | . | . | T | . | E | E | . | . | . | . | F | . | . |
| 21.17.6 | | | | | | | | | | | | | | | | | | | | | | | | | | | | |
| CH3C.35.20 | . | . | . | . | . | . | Y | . | T | E | W | S | S | . | . | . | . | T | . | E | E | . | . | . | . | F | . | . |
| CH3C.35.21 | . | . | W | . | . | . | Y | . | T | E | W | S | S | . | . | . | . | T | . | E | E | . | . | . | . | F | . | . |
| CH3C.35.22 | . | . | W | . | . | . | Y | . | T | E | W | S | . | . | . | . | . | T | . | | E | . | . | . | . | F | . | . |
| CH3C.35.23 | . | . | . | . | . | . | Y | . | T | E | W | S | . | . | . | . | . | T | . | E | E | . | . | . | . | F | . | . |
| CH3C.35.24 | . | . | W | . | . | . | Y | . | T | E | W | S | . | . | . | . | . | T | . | E | E | . | . | . | . | F | . | . |
| CH3C.35.21. | . | . | L | . | . | . | Y | . | T | E | W | S | S | . | . | . | . | T | . | E | E | . | . | . | . | F | . | . |
| 17 | | | | | | | | | | | | | | | | | | | | | | | | | | | | |
| CH3C.35. | . | . | . | . | . | . | Y | . | T | E | W | S | . | . | . | . | . | T | . | | E | . | . | . | . | F | . | . |
| N390 | | | | | | | | | | | | | | | | | | | | | | | | | | | | |
| CH3C.35. | | | | | | | F | | T | E | W | S | S | | | | | S | | E | E | | | | | F | | |
| 20.1.1 | | | | | | | | | | | | | | | | | | | | | | | | | | | | |
| CH3C.35. | | | | | | | Y | | T | E | W | A | | | | | | S | | | E | | | | | F | | |
| 23.2.1 | | | | | | | | | | | | | | | | | | | | | | | | | | | | |
| CH3C.35. | | | | | | | F | | T | E | w | S | | | | | | S | | E | E | | | | | F | | |
| 23.1.1 | | | | | | | | | | | | | | | | | | | | | | | | | | | | |
| CH3C.35. | | | | | | | Y | | T | E | W | S | S | | | | | S | | | E | | | | | F | | |
| S413 | | | | | | | | | | | | | | | | | | | | | | | | | | | | |
| CH3C.35. | | | | | | | Y | | T | E | W | V | | | | | | S | | E | E | | | | | F | | |
| 23.3.1 | | | | | | | | | | | | | | | | | | | | | | | | | | | | |
| CH3C.35. | | | | | | | Y | | T | E | W | S | | | | | | S | | | E | | | | | F | | |
| N390.1 | | | | | | | | | | | | | | | | | | | | | | | | | | | | |
| CH3C.35. | | | | | | | F | | T | E | W | V | | | | | | S | | E | E | | | | | F | | |
| 23.6.1 | | | | | | | | | | | | | | | | | | | | | | | | | | | | |

### Monovalent Polypeptide-Fab Fusions

[0372] Generation of Monovalent TfR-Binding Polypeptide-Fab Fusions

[0373] Although Fc domains naturally form homodimers, a series of asymmetric mutations known as “knobs-in-holes” can lead to preferential heterodimerization of two Fc fragments, where one Fc unit has the T366W knob mutation and the other Fc unit has the T366S, L368A, and Y407V hole mutations. In some embodiments, a modified CH3 domain of the invention comprises a Trp at position 366. In some embodiments, a modified CH3 domain of the invention comprises a Ser at position 366, an Ala at position 368, and a Val at position 407. Heterodimeric TfR-binding polypeptides were expressed in 293 or CHO cells by transient co-transfection of two plasmids (i.e., a knob-Fc and a hole-Fc), while polypeptide-Fab fusions were expressed by transient co-transfection of three plasmids (i.e., a knob-Fc-Fab heavy chain, a hole-Fc-Fab heavy chain, and a common light chain). Purification of secreted heterodimeric polypeptides or polypeptide-Fab fusions was performed identically to that for homodimers (i.e., a two-column purification using Protein A followed by size-exclusion, and then concentration and buffer exchange if required). Mass-spectrometry or hydrophobic interaction chromatography was used to determine the amount of heterodimer versus homodimer (e.g., knob-knob or hole-hole paired Fe's) formed. From typical preps, greater than 95% of polypeptides, and often greater than 98%, were heterodimers. For heterodimeric polypeptides and polypeptide-Fab fusions, the mutations that conferred TfR binding included the “knob” mutation, whereas a non-TfR-binding Fc region was used with the “hole” region, unless otherwise indicated. In some cases, additional mutations that alter Fc properties were also included in these constructs, such as L234A/L235A, M252Y/S254T/T256E, N434S, or N434S/M428L for modified FcγR or FcRn binding, respectively.

[0374] Binding Characterization of CH3C.Mono Fc Polypeptides

[0375] Binding of monovalent CH3C polypeptides was measured in an ELISA using a modification of the procedure described above. Streptavidin was coated on 96-well ELISA plates overnight at 1 μg/mL in PBS. After washing, the plates were blocked with 1% BSA in PBS, then biotinylated human or cyno TfR was added at 1 μg/mL and incubated for 30 minutes. After additional washing, polypeptides were added to the plates at serial dilutions, and incubated for 1 hour. The plates were washed and secondary antibody (i.e., anti-kappa-HRP, 1:5,000) was added for 30 minutes and the plates were washed again. The plates were developed with TMB substrate and quenched with 2N H2504 and then absorbance at 450 nm was read on a BioTek® plate reader. Bivalent TfR-binding and monovalent TfR-binding polypeptides were compared. Ab204 was used as a high affinity anti-TfR control antibody.

[0376] Additional testing was performed for binding to 293F cells, which endogenously express human TfR, as well as CHO-K1 cells that were stably transfected with human TfR or cyno TfR.

[0377] In general, substantially reduced binding to human TfR for monovalent polypeptides was observed as compared to bivalent polypeptides, and cyno binding was too weak to be detected in these assays for the monovalent polypeptides.

[0378] Next it was tested whether monovalent versions of CH3C polypeptides could internalize in human-TfR expressing HEK293 cells. Methods described above for internalization assays were used. The monovalent peptides could also internalize, but the overall signal was weaker than for the respective bivalent versions, presumably due to the loss of binding affinity/avidity.

[0379] Kinetics of Binding for CH3C Polypeptides Measured by Biolayer Inferometry

[0380] Binding kinetics were determined for several monovalent and bivalent CH3C polypeptide variants, fused to anti-BACE1 Fabs, and compared to their bivalent equivalents using biolayer inferometry (i.e., using an Octet® RED system). TfR was captured on a streptavidin sensor, then CH3C polypeptides were bound and washed off. Sensograms were fitted to a 1:1 binding model; the K_{D} (app) value for bivalent polypeptides represented avid binding to the TfR dimer.

[0381] The polypeptides that were converted to monovalent format had significantly weaker K_{D} (app) values, due to loss of avidity. Clones CH3C.3.2-1, CH3C.3.2-5, and CH3C.3.2-19, which were previously shown to have similar human and cyno TfR binding by ELISA, also had very similar K_{D} (app) values between human and cyno TfR. An attempt was made to test the monovalent forms of these polypeptides, but the binding in this assay was too weak to calculate kinetic parameters.

### Example 2. Single Amino Acid Substitution of CH3C.35.21

[0382] This example describes the construction of a library of CH3C.35.21 single amino acid mutants.

### Methods

[0383] A library of CH3C.35.21 mutants each containing a single amino acid substitution of CH3C.35.21 was constructed using Kunkel mutagenesis (Kunkel, Proc Natl Acad Sci USA. 82(2):488-92, 1985). For CH3C.35.21, each of positions W380, Y384, T386, E387, W388, S389, S390, K392, T413, K414, E415, E416, F421, S424, and S426, as numbered according to the EU numbering scheme, were mutated individually to the codon NNK using degenerate mutagenic oligos. To avoid obtaining the original CH3C.35.21 clone in the library, the single-stranded DNA (ssDNA) Kunkel template encoded a wild-type IgG1 Fc was used. Two mutagenic oligos (one with an NNK and the other encoding the other CH3C.35.21 region) were used in combination so that when both oligos were incorporated it yielded the CH3C.35.21 amino acid sequence, but with an NNK codon at the desired library positon. Because the template is a wild-type Fc, a single oligo insertion or no oligo insertion will not bind TfR, therefore, these constructs were easily eliminated from any analysis. Similarly, stop codons arising from the NNK positon were excluded. Libraries were transfected into EBY100 yeast. Eight colonies were sequenced from each library to ensure the naïve library contains the desired position randomization.

[0384] The top approximately 10% of the circularly permuted TfR apical domain bound population measured by yeast display and flow cytometry, were collected at a TfR concentration providing the best range for distinguishing affinities. Sequences were obtained for 12 clones for each positon. For libraries with distinct populations, the same experiment was done with better defined high, medium, low gates. There were 36 clones sequenced for each collected population. Further, in order to compare the binding of a mutant to the binding of the corresponding mutant having the wild-type residue at the corresponding amino acid position, the amino acid at the same position was reverted back to the wild-type IgG1 residue using a mutagenic oligo in similar methods.

[0385] Table 8 shows the library of CH3C.35.21 mutants. Each mutant contained a single amino acid substitution of CH3C.35.21. For example, one mutant may contain W380E and the amino acids at the rest of the positions are the same as those in CH3C.35.21. The positions shown in Table 8 are numbered according to the EU numbering scheme.

TABLE 8
CH3C.35.21 single amino acid mutants

| Position | 380 | 384 | 386 | 387 | 388 | 389 | 390 | 413 | 415 | 416 | 421 | 424 | 426 |
|---|---|---|---|---|---|---|---|---|---|---|---|---|---|
| Wild- | E | N | Q | P | E | N | N | D | S | R | N | S | S |
| type Fc | | | | | | | | | | | | | |
| CH3C. | | | | | | | | | | | | | |
| 35.21 | W | Y | T | E | W | S | S | T | E | E | F | S | S |
| Residues | E | Y | T | E | W | S | S | T | S | E | F | S | S |
| found | L | F | N | I | | A | N | H | D | R | H | T | c |
| to have | S | M | V | P | | I | R | S | G | | K | W | P |
| affinity | V | P | | V | | T | T | | T | | Y | | M |
| in the | W | V | | | | V | | | P | | | | W |
| range: | Y | W | | | | | | | 0 | | | | |
| <190 nM | | | | | | | | | R | | | | |
| to | | | | | | | | | | | | | |
| about | | | | | | | | | | | | | |
| ~500 nM | | | | | | | | | | | | | |

### Example 3. Generation of CH3C.18 Variants

[0386] This example describes the generation of CH3C.18 variants.

[0387] Single clones were isolated, and grown overnight in SG-CAA media supplemented with 0.2% glucose overnight to induce surface expression of CH3C.18 variants. For each clone, two million cells were washed three times in PBS+0.5% BSA at pH 7.4. Cells were stained with biotinylated target, 250 nM human TfR, 250 nM cyno TfR, or 250 nM of an unrelated biotinylated protein for 1 hour at 4° C. with shaking, then washed twice with the same buffer. Cells were stained with nuetravidin-Alexafluor647 (AF647) for 30 minutes at 4° C., then washed twice again. Expression was measured using anti-c-myc antibody with anti-chicken-Alexfluor488 (AF488) secondary antibody. Cells were resuspended, and median fluorescence intensity (MFI) of AF647 and AF488 was measured on a BD FACS CantoII. MFI was calculated for the TfR-binding population for each population and plotted with human TfR, cyno TfR, or control binding.

[0388] Table 9 shows the library of CH3C.18 variants. Each row represents a variant that contains the indicated amino acid substitutions at each position and the amino acids at the rest of the positions are the same as those in the CH3C.18 Fc. The positions shown in Table 9 are numbered according to the EU numbering scheme.

TABLE 9
CH3C.18 variants

| Position | 384 | 386 | 387 | 389 | 390 | 391 | 413 | 416 | 421 |
|---|---|---|---|---|---|---|---|---|---|
| Wild-type | N | Q | P | N | N | Y | D | R | N |
| Fc | | | | | | | | | |
| CH3C.4 | V | T | P | A | L | Y | L | E | W |
| (CH3C. | | | | | | | | | |
| 18.1) | | | | | | | | | |
| CH3C.2 | Y | T | V | S | H | Y | S | E | Y |
| (CH3C. | | | | | | | | | |
| 18.2) | | | | | | | | | |
| CH3C.3 | Y | T | E | S | Q | Y | E | D | H |
| (CH3C. | | | | | | | | | |
| 18.3) | | | | | | | | | |
| CH3C.1 | L | L | V | V | G | Y | A | T | W |
| (CH3C. | | | | | | | | | |
| 18.4) | | | | | | | | | |
| CH3C.18 | L | H | V | A | V | Y | P | T | W |
| (CH3C.18. | | | | | | | | | |
| 1.18) | | | | | | | | | |
| CH3C.3. | L | H | V | V | A | T | P | T | W |
| 1-3 | | | | | | | | | |
| (CH3C.18. | | | | | | | | | |
| 3.1-3) | | | | | | | | | |
| CH3C.3. | L | P | V | V | H | T | P | T | W |
| 1-9 | | | | | | | | | |
| (CH3C.18. | | | | | | | | | |
| 3.1-9) | | | | | | | | | |
| CH3C.3. | L | H | V | V | N | F | P | T | W |
| 2-1 | | | | | | | | | |
| (CH3C.18. | | | | | | | | | |
| 3.2-1) | | | | | | | | | |
| CH3C.3. | L | H | V | V | D | Q | P | T | W |
| 2-5 | | | | | | | | | |
| (CH3C.18. | | | | | | | | | |
| 3.2-5) | | | | | | | | | |
| CH3C.3. | L | H | V | V | N | Q | P | T | W |
| 2-19 | | | | | | | | | |
| (CH3C.18. | | | | | | | | | |
| 3.2-19) | | | | | | | | | |
| CH3C.3. | W | F | V | S | T | Y | P | N | F |
| 4-1 | | | | | | | | | |
| (CH3C.18. | | | | | | | | | |
| 3.4-1) | | | | | | | | | |
| CH3C.3. | W | H | V | S | T | Y | P | N | Y |
| 4-19 | | | | | | | | | |
| (CH3C.18. | | | | | | | | | |
| 3.4-19) | | | | | | | | | |
| CH3C.3. | L | H | V | V | E | Q | P | T | W |
| 2-3 | | | | | | | | | |
| (CH3C.18. | | | | | | | | | |
| 3.2-3) | | | | | | | | | |
| CH3C.3. | L | H | V | V | G | V | P | T | W |
| 2-14 | | | | | | | | | |
| (CH3C.18. | | | | | | | | | |
| 3.2-14) | | | | | | | | | |
| CH3C.3. | L | H | V | V | H | T | P | T | W |
| 2-24 | | | | | | | | | |
| (CH3C.18. | | | | | | | | | |
| 3.2-24) | | | | | | | | | |
| CH3C.3. | W | T | V | G | T | Y | P | N | Y |
| 4-26 | | | | | | | | | |
| (CH3C.18. | | | | | | | | | |
| 3.4-26) | | | | | | | | | |
| CH3C.3. | L | H | V | V | G | T | P | T | W |
| 2-17 | | | | | | | | | |
| (CH3C.18. | | | | | | | | | |
| 3.2-17) | | | | | | | | | |

### Example 4. Fab-Fc/scFv-Fc with TfR-Binding Fc Polypeptide

[0389] This example describes the generation and characterization of an engineered protein comprising a TfR-binding Fc polypeptide that is fused to two different targeting variable domains (a variable domain that targets a first antigen (BACE1) and a variable domain that targets a second antigen (Tau)). The protein can be generated in a single cell without light chain mispairing or steering by making the asymmetric fusion construct shown in FIG. 1. These constructs comprise three polypeptide chains and were made through simultaneous recombinant expression of each chain. The first chain is a TfR-binding Fc polypeptide comprising a knob mutation for Fc heterodimerization, and a hinge fused at its N-terminus to the Fd portion of a Fab. The second chain is the corresponding light chain, which pairs to form a Fab against antigen target 1. The third chain is an Fc polypeptide comprising a hinge and a N-terminal flexible linker (e.g., G₄S or (G₄S)₂) and an scFv against antigen target 2.

[0390] Polypeptides with this architecture were generated using the TfR-binding Fc region 3C.35.23.4 with a knob mutation fused to an anti-BACE1 Fab, paired with a hole Fc fused to an scFv for an anti-Tau antibody. Four versions of the anti-Tau scFv were generated; the linker to the Fc was tested as GGGGS (SEQ ID NO:371) or GGGGSGGGGS (SEQ ID NO:372), and the order of domains was tested as either VL-linker-VH or VH-linker-VL. For the former orientation, the linker RTVAGGGGSGGGGSGGGGS (SEQ ID NO:374) was used, and for the latter orientation the linker ASTKGGGGSGGGGSGGGGS (SEQ ID NO:375) was used. The same anti-BACE1 light chain sequence was used for all constructs. All constructs were made as effector function null Fc's by incorporating L234A/L235A (LALA) mutations.

[0391] Genes corresponding to each of the three chains was cloned into expression vectors, and the vectors were co-transfected into ExpiCHO cells for transient expression then purified by Protein A chromotagraphy. The recombinant polypeptides were subsequently tested for their ability to engage the first antigen (BACE1), the second antigen (Tau), and TfR using Biacore. As indicated in Table 10 below, all four variants bound TfR and BACE1, but only variants 2 and 4 bound Tau. This result suggests that the VL-linker-VH orientation is preferred for this scFv.

TABLE 10
Summary of Binding Kinetics of Bispecific
Proteins Having Fab-Fc/scFv-Fc Architecture

| | scFv | | TfR KD | BACE1 KD | Tau KD |
|---|---|---|---|---|---|
| Variant | orientation | Linker | (M) | (M) | (M) |
| V1 | VH-L-VL | (G₄S)₂ | 7.0E−7 | 1.3E−10 | No binding |
| V2 | VL-L-VH | (G₄S)₂ | 3.9E−7 | 6.3E−10 | <E−10 |
| V3 | VH-L-VL | G₄S | 9.9E−7 | 3.9E−10 | No binding |
| V4 | VL-L-VH | G₄S | 3.9E−7 | 9.8E−10 | <E−10 |

### Example 5. C-Terminal Fv Fused to TfR-Binding Fc Polypeptides

[0392] To incorporate target antigen binding, a Fc polypeptide comprising one Fc subunit with TfR-binding mutations and a knob mutation and a second Fc subunit with a hole mutation can be modified by adding a flexible linker to the C-termini of both chains followed by the variable domains from an antibody (VH to one subunit and VL to the other). In an exemplary embodiment of this architecture, the N-termini of the Fc domains are further fused to a Fab that binds to a second antigen, as shown in FIG. 2. The resulting configuration is a four chain polypeptide (two different heavy chains and two copies of the same light chain) that binds to TfR, one target antigen bivalently, and a second antigen monovalently.

[0393] Polypeptides of this architecture were generated where Fab arms from an anti-Tau antibody were fused to the N-terminus of TfR-binding polypeptide 3C.35.23.4, thereby allowing bivalent binding to Tau, and VL and VH from an anti-BACE1 antibody were respectively fused to the N-termini of the two Fc chains following a linker. A total of eight molecules were initially generated where three parameters were varied: the fused Fv's were from one of two anti-BACE1 antibody clones, the linker was either GGGGS (SEQ ID NO:371) or GGGGSGGGGS (SEQ ID NO:372), and the orientation of the VH and VL fusions (e.g., either VH was on heavy chain 1 and VL was on heavy chain 2, or vice versa).

[0394] These constructs comprise three polypeptide chains and were made through simultaneous recombinant expression of each chain. The first chain is an Fc polypeptide comprising the TfR-binding mutations 3C.35.23.4 and a knob mutation, fused at the N-terminus to the Fd region from an anti-Tau Fab, and fused at the C-terminus to a linker followed by the VH or VL from an anti-BACE1 Fab. The second chain is an Fc polypeptide comprising a hole mutation, fused at the N-terminus to the Fd region from an anti-Tau Fab, and fused at the C-terminus to a linker followed by the alternate variable domain (VH or VL) from the anti-BACE1 Fab. The third chain is the light chain corresponding to the anti-Tau Fab. All heavy chains had the C-terminal lysine from the canonical Fc sequence removed, and were made as effector function null Fc's by incorporating L234A/L235A (LALA) mutations.

[0395] Genes corresponding to each of the three chains were cloned into expression vectors, and the vectors were co-transfected into ExpiCHO cells for transient expression, then purified by Protein A chromotagraphy. The recombinant polypeptides were tested for their ability to engage the BACE1, Tau, and TfR using Biacore, as shown in Table 11 below.

Table 11. Summary of Binding Kinetics of Bispecific Proteins Having mAb/Fv Architecture

TABLE 11
Summary of Binding Kinetics of Bispecific
Proteins Having mAb/Fv Architecture

| | Ct-VH | | | | |
|---|---|---|---|---|---|
| | linked to | | TfR KD | BACE1 KD | Tau KD |
| Variant | (knob or hole) | Linker | (M) | (M) | (M) |
| V1 | Hole | G₄S | 5.1E−7 | 1.3E−8 | <1.0E−10 |
| V2 | Knob | G₄S | 4.3E−7 | 1.2E−8 | <1.0E−10 |
| V3 | Hole | (G₄S)₂ | 2.8E−7 | 4.0E−8 | <1.0E−10 |
| V4 | Knob | (G₄S)₂ | 3.7E−7 | 2.6E−8 | <1.0E−10 |
| V5 | Hole | G₄S | 3.2E−7 | 1.1E−8 | <1.0E−10 |
| V6 | Knob | G₄S | Nd | Nd | <1.0E−10 |
| V7 | Hole | (G₄S)₂ | 3.6E−7 | 2.1E−8 | <1.0E−10 |
| V8 | Knob | (G₄S)₂ | 2.9E−7 | 9.0E−9 | <1.0E−10 |

### Example 6. C-Terminal scFv Fusion to TfR-Binding Peptides

[0396] Polypeptides that comprise TfR-binding peptides fused at the N-terminus with Fabs against a first antigen and at the C-terminus with scFv(s) against the second antigen (either on the heavy chain hole only, FIG. 3A, or on both the knob and hole chains, FIG. 3B) were generated similarly to as described in Examples 1 and 2. Three expression plasmids were generated for each construct: a TfR-binding Fc polypeptide comprising a knob mutation along with N-terminal Fd against target 1 with or without a C-terminal scFv against target 2, an Fc polypeptide comprising a hole mutation along with N-terminal Fd against target 1 and a C-terminal scFv against target 2, and a light chain against target 1. The variable domains used were derived from anti-BACE1 antibodies and an anti-Tau antibody; orientations with BACE1 as target 1 and Tau as target 2 or vice versa were generated.

### Example 7. Generation of Bispecific Proteins

[0397] Engineered proteins having the architecture of a bispecific protein as shown in FIG. 1, FIG. 2, FIG. 3A, or FIG. 3B were generated to target two different antigens (Tau and BACE1). Architecture and sequence details for the constructs are shown in Tables 12-14 below. All constructs were made as effector function null by incorporating L234A/L235A (LALA) mutations into the Fc polypeptides. For the constructs in Table 13, all of the constructs had the C-terminal lysine immediately preceding the linker removed from both heavy chain 1 and heavy chain 2. For the constructs in Table 14, some constructs were generated in which the C-terminal lysine immediately preceding the linker (“Lys447”) was removed from heavy chain 2 (for proteins having one C-terminal scFv), or from both heavy chain 1 and heavy chain 2 (for proteins having two C-terminal scFvs). For the constructs in Tables 13 and 14, some constructs were generated that incorporated M428L/N434S (LS) mutations into the Fc polypeptides.

TABLE 12
Sequences for Bispecific Proteins Having Fab-Fc/scFv-Fc Architecture

| | | scFv- | | scFv | | | TfR |
|---|---|---|---|---|---|---|---|
| Construct | | CH2 | scFv | Domain | | scFv | Binding |
| No. | Fab | Linker | Antibody | Order | scFv Linker | Disulfide | Clone |
| 1 | Anti-BACE1 | G₄S | Anti-Tau | VL-VH | RTVA(G₄S)₃ | — | 35.23.4 |
| 2 | Anti-BACE1 | G₄S | Anti-Tau | VL-VH | RTVA(G₄S)₃ | H44-L100 | 35.23.4 |
| 3 | Anti-BACE1 | G₄S | Anti-Tau | VL-VH | (G₄S)₃ | — | 35.23.4 |
| 4 | Anti-BACE1 | G₄S | Anti-Tau | VL-VH | (G₄S)₃ | H44-L100 | 35.23.4 |
| 5 | Anti-Tau | G₄S | Anti-BACE1 | VL-VH | RTVA(G₄S)₃ | — | 35.23.4 |
| 6 | Anti-Tau | G₄S | Anti-BACE1 | VL-VH | RTVA(G₄S)₃ | H44-L100 | 35.23.4 |
| 7 | Anti-Tau | G₄S | Anti-BACE1 | VH-VL | ASTK(G₄S)₃ | — | 35.23.4 |
| 8 | Anti-Tau | G₄S | Anti-BACE1 | VH-VL | ASTK(G₄S)₃ | H44-L100 | 35.23.4 |
| 9 | Anti-Tau | G₄S | Anti-BACE1 | VL-VH | RTVA(G₄S)₃ | — | 35.23.4 |
| 10 | Anti-Tau | G₄S | Anti-BACE1 | VL-VH | RTVA(G₄S)₃ | H44-L100 | 35.23.4 |
| 11 | Anti-Tau | G₄S | Anti-BACE1 | VH-VL | ASTK(G₄S)₃ | — | 35.23.4 |
| 12 | Anti-Tau | G₄S | Anti-BACE1 | VH-VL | ASTK(G₄S)₃ | H44-L100 | 35.23.4 |

TABLE 13
Sequences for Bispecific Proteins Having C-Terminal-Fv Architecture

| | | | | | | | Half-Life | TfR |
|---|---|---|---|---|---|---|---|---|
| Construct | | Fv | Linker | Fv | Linker | scFv | Extension | Binding |
| No. | Fab | (knob) | (knob) | (hole) | (hole) | Disulfide | Mutation | Clone |
| 13 | Anti-Tau | Anti- | G₄S | Anti- | G₄S | — | — | 35.23.4 |
| | | BACE1 | | BACE1 | | | | |
| 14 | Anti-Tau | Anti- | G₄S | Anti- | G₄S | — | — | 35.23.4 |
| | | BACE1 | | BACE1 | | | | |
| 15 | Anti-Tau | Anti- | (G₄S)₂ | Anti- | (G₄S)₂ | — | — | 35.23.4 |
| | | BACE1 | | BACE1 | | | | |
| 16 | Anti-Tau | Anti- | (G₄S)₂ | Anti- | (G₄S)₂ | — | — | 35.23.4 |
| | | BACE1 | | BACE1 | | | | |
| 17 | Anti-Tau | Anti- | G₄S | Anti- | G₄S | — | — | 35.23.4 |
| | | BACE1 | | BACE1 | | | | |
| 18 | Anti-Tau | Anti- | G₄S | Anti- | G₄S | — | — | 35.23.4 |
| | | BACE1 | | BACE1 | | | | |
| 19 | Anti-Tau | Anti- | (G₄S)₂ | Anti- | (G₄S)₂ | — | — | 35.23.4 |
| | | BACE1 | | BACE1 | | | | |
| 20 | Anti-Tau | Anti- | (G₄S)₂ | Anti- | (G₄S)₂ | — | — | 35.23.4 |
| | | BACE1 | | BACE1 | | | | |
| 21 | Anti-Tau | Anti- | (G₄S)₂-G₄ | Anti- | (G₄S)₂-G₄ | — | — | 35.23.4 |
| | | BACE1 | | BACE1 | | | | |
| 22 | Anti-Tau | Anti- | (G₄S)₂-G₄ | Anti- | (G₄S)₂-G₄ | H44-L100 | — | 35.23.4 |
| | | BACE1 | | BACE1 | | | | |
| 23 | Anti-Tau | Anti- | (G₄S)₂-G₄ | Anti- | (G₄S)₂-G₄ | — | — | 35.23.4 |
| | | BACE1 | | BACE1 | | | | |
| 24 | Anti-Tau | Anti- | (G₄S)₂-G₄ | Anti- | (G₄S)₂-G₄ | H44-L100 | — | 35.23.4 |
| | | BACE1 | | BACE1 | | | | |
| 25 | Anti-Tau | Anti- | (G₄S)₃-G₄ | Anti- | (G₄S)₃-G₄ | — | — | 35.23.4 |
| | | BACE1 | | BACE1 | | | | |
| 26 | Anti-Tau | Anti- | (G₄S)₃-G₄ | Anti- | (G₄S)₃-G₄ | H44-L100 | — | 35.23.4 |
| | | BACE1 | | BACE1 | | | | |
| 27 | Anti-Tau | Anti- | (G₄S)₃-G₄ | Anti- | (G₄S)₃-G₄ | — | — | 35.23.4 |
| | | BACE1 | | BACE1 | | | | |
| 28 | Anti-Tau | Anti- | (G₄S)₃-G₄ | Anti- | (G₄S)₃-G₄ | H44-L100 | — | 35.23.4 |
| | | BACE1 | | BACE1 | | | | |
| 29 | Anti-Tau | Anti- | (G₄S)₂-G₄ | Anti- | G₄S-G₄ | — | — | 35.23.4 |
| | | BACE1 | | BACE1 | | | | |
| 30 | Anti-Tau | Anti- | (G₄S)₂-G₄ | Anti- | G₄S-G₄ | H44-L100 | — | 35.23.4 |
| | | BACE1 | | BACE1 | | | | |
| 31 | Anti-Tau | Anti- | (G₄S)₂-G₄ | Anti- | G₄S-G₄ | — | — | 35.23.4 |
| | | BACE1 | | BACE1 | | | | |
| 32 | Anti-Tau | Anti- | (G₄S)₂-G₄ | Anti- | G₄S-G₄ | H44-L100 | — | 35.23.4 |
| | | BACE1 | | BACE1 | | | | |
| 33 | Anti-Tau | Anti- | (G₄S)₂-G₄ | Anti- | (G₄S)₂-G₄ | H44-L100 | — | 35.23 |
| | | BACE1 | | BACE1 | | | | |
| 34 | Anti-Tau | Anti- | (G₄S)₂-G₄ | Anti- | (G₄S)₂-G₄ | H44-L100 | — | 35.23.3 |
| | | BACE1 | | BACE1 | | | | |
| 35 | Anti-Tau | Anti- | (G₄S)₂-G₄ | Anti- | (G₄S)₂-G₄ | H44-L100 | LS | 35.23.4 |
| | | BACE1 | | BACE1 | | | | |
| 36 | Anti-Tau | Anti- | (G₄S)₂-G₄ | Anti- | (G₄S)₂-G₄ | H44-L100 | LS | 35.23 |
| | | BACE1 | | BACE1 | | | | |
| 37 | Anti-Tau | Anti- | (G₄S)₂-G₄ | Anti- | (G₄S)₂-G₄ | H44-L100 | LS | 35.23.3 |
| | | BACE1 | | BACE1 | | | | |

TABLE 14
Sequences for Bispecific Proteins Having C-Terminal-scFv Architecture

| | | | | | | | | | |
|---|---|---|---|---|---|---|---|---|---|
| | | CH3- | | scFv | | | Half-Life | Lysine | TfR |
| Construct | | scFv | scFv | Domain | | scFv | Extension | 447 | Binding |
| No. | Fab | Linker | Antibody | Order | scFv Linker | Disulfide | Mutation | Removed? | Clone |

Proteins Having One C-Terminal scFv

| | | | | | | | | | |
|---|---|---|---|---|---|---|---|---|---|
| 38 | Anti- | G₄S | Anti- | VL-VH | RTVA(G₄S)₃ | — | — | No | 35.23.4 |
| | Tau | | BACE1 | | | | | | |
| 39 | Anti- | (G₄S)₂ | Anti- | VL-VH | RTVA(G₄S)₃ | — | — | No | 35.23.4 |
| | Tau | | BACE1 | | | | | | |
| 40 | Anti- | G₄S | Anti- | VL-VH | RTVA(G₄S)₃ | H44- | — | No | 35.23.4 |
| | Tau | | BACE1 | | | L100 | | | |
| 41 | Anti- | (G₄S)₂ | Anti- | VL-VH | RTVA(G₄S)₃ | H44- | — | No | 35.23.4 |
| | Tau | | BACE1 | | | L100 | | | |
| 42 | Anti- | G₄S | Anti- | VH-VL | ASTK(G₄S)₃ | — | — | No | 35.23.4 |
| | Tau | | BACE1 | | | | | | |
| 43 | Anti- | (G₄S)₂ | Anti- | VH-VL | ASTK(G₄S)₃ | — | — | No | 35.23.4 |
| | Tau | | BACE1 | | | | | | |
| 44 | Anti- | G₄S | Anti- | VH-VL | ASTK(G₄S)₃ | H44- | — | No | 35.23.4 |
| | Tau | | BACE1 | | | L100 | | | |
| 45 | Anti- | (G₄S)₂ | Anti- | VH-VL | ASTK(G₄S)₃ | H44- | — | No | 35.23.4 |
| | Tau | | BACE1 | | | L100 | | | |
| 46 | Anti- | (G₄S)₂ | Anti- | VL-VH | RTVA(G₄S)₃ | H44- | — | Yes | 35.23.4 |
| | Tau | | BACE1 | | | L100 | | | |
| 47 | Anti- | (G₄S)₂ | Anti- | VH-VL | ASTK(G₄S)₃ | H44- | — | Yes | 35.23.4 |
| | Tau | | BACE1 | | | L100 | | | |
| 48 | Anti- | (G₄S)₂ | Anti- | VL-VH | RTVA(G₄S)₃ | H44- | — | Yes | 35.23.1.1 |
| | Tau | | BACE1 | | | L100 | | | |
| 49 | Anti- | (G₄S)₂ | Anti- | VL-VH | RTVA(G₄S)₃ | H44- | — | Yes | 35.23.3 |
| | Tau | | BACE1 | | | L100 | | | |
| 50 | Anti- | (G₄S)₂ | Anti- | VL-VH | RTVA(G₄S)₃ | H44- | — | Yes | 35.23 |
| | Tau | | BACE1 | | | L100 | | | |
| 51 | Anti- | (G₄S)₂ | Anti- | VL-VH | RTVA(G₄S)₃ | H44- | — | Yes | 35.23.3 |
| | Tau | | BACE1 | | | L100 | | | |
| 52 | Anti- | (G₄S)₂ | Anti- | VL-VH | RTVA(G₄S)₃ | H44- | LS | Yes | 35.23.4 |
| | Tau | | BACE1 | | | L100 | | | |
| 53 | Anti- | (G₄S)₂ | Anti- | VL-VH | RTVA(G₄S)₃ | H44- | LS | Yes | 35.23 |
| | Tau | | BACE1 | | | L100 | | | |
| 54 | Anti- | (G₄S)₂ | Anti- | VL-VH | RTVA(G₄S)₃ | H44- | LS | Yes | 35.23.3 |
| | Tau | | BACE1 | | | L100 | | | |
| 55 | Anti- | (G₄S)₂ | Anti- | VH-VL | ASTK(G₄S)₃ | H44- | — | Yes | 35.23 |
| | Tau | | BACE1 | | | L100 | | | |

Proteins Having One C-Terminal scFv

| | | | | | | | | | |
|---|---|---|---|---|---|---|---|---|---|
| 56 | Anti- | (G₄S)₂ | Anti- | VH-VL | ASTK(G₄S)₃ | H44- | — | Yes | 35.23.3 |
| | Tau | | BACE1 | | | L100 | | | |
| 57 | Anti- | (G₄S)₂ | Anti- | VH-VL | ASTK(G₄S)₃ | H44- | LS | Yes | 35.23.4 |
| | Tau | | BACE1 | | | L100 | | | |
| 58 | Anti- | (G₄S)₂ | Anti- | VH-VL | ASTK(G₄S)₃ | H44- | LS | Yes | 35.23 |
| | Tau | | BACE1 | | | L100 | | | |
| 59 | Anti- | (G₄S)₂ | Anti- | VH-VL | ASTK(G₄S)₃ | H44- | LS | Yes | 35.23.3 |
| | Tau | | BACE1 | | | L100 | | | |

Proteins Having Two C-Terminal scFvs

| | | | | | | | | | |
|---|---|---|---|---|---|---|---|---|---|
| 60 | Anti- | (G₄S)₂ | Anti-Tau | VL-VH | RTVA(G₄S)₃ | — | — | Yes | 35.23.4 |
| | BACE1 | | | | | | | | |
| 61 | Anti- | (G₄S)₂ | Anti-Tau | VL-VH | RTVA(G₄S)₃ | H44- | — | Yes | 35.23.4 |
| | BACE1 | | | | | L100 | | | |
| 62 | Anti- | (G₄S)₂ | Anti- | VL-VH | RTVA(G₄S)₃ | H44- | — | Yes | 35.23.4 |
| | Tau | | BACE1 | | | L100 | | | |
| 63 | Anti- | (G₄S)₂ | Anti- | VH-VL | ASTK(G₄S)₃ | H44- | — | | 35.23.4 |
| | Tau | | BACE1 | | | L100 | | | |
| 64 | Anti- | (G₄S)₂ | Anti- | VL-VH | RTVA(G₄S)₃ | H44- | — | Yes | 35.23 |
| | Tau | | BACE1 | | | L100 | | | |
| 65 | Anti- | (G₄S)₂ | Anti- | VL-VH | RTVA(G₄S)₃ | H44- | — | Yes | 35.23.3 |
| | Tau | | BACE1 | | | L100 | | | |
| 66 | Anti- | (G₄S)₂ | Anti- | VL-VH | RTVA(G₄S)₃ | H44- | LS | Yes | 35.23.4 |
| | Tau | | BACE1 | | | L100 | | | |
| 67 | Anti- | (G₄S)₂ | Anti- | VL-VH | RTVA(G₄S)₃ | H44- | LS | Yes | 35.23 |
| | Tau | | BACE1 | | | L100 | | | |
| 68 | Anti- | (G₄S)₂ | Anti- | VL-VH | RTVA(G₄S)₃ | H44- | LS | Yes | 35.23.3 |
| | Tau | | BACE1 | | | L100 | | | |
| 69 | Anti- | (G₄S)₂ | Anti- | VH-VL | ASTK(G₄S)₃ | H44- | — | Yes | 35.23.4 |
| | Tau | | BACE1 | | | L100 | | | |
| 70 | Anti- | (G₄S)₂ | Anti- | VH-VL | ASTK(G₄S)₃ | H44- | — | Yes | 35.23 |
| | Tau | | BACE1 | | | L100 | | | |
| 71 | Anti- | (G₄S)₂ | Anti- | VH-VL | ASTK(G₄S)₃ | H44- | — | Yes | 35.23.3 |
| | Tau | | BACE1 | | | L100 | | | |
| 72 | Anti- | (G₄S)₂ | Anti- | VH-VL | ASTK(G₄S)₃ | H44- | LS | Yes | 35.23.4 |
| | Tau | | BACE1 | | | L100 | | | |
| 73 | Anti- | (G₄S)₂ | Anti- | VH-VL | ASTK(G₄S)₃ | H44- | LS | Yes | 35.23 |
| | Tau | | BACE1 | | | L100 | | | |
| 74 | Anti- | (G₄S)₂ | Anti- | VH-VL | ASTK(G₄S)₃ | H44- | LS | Yes | 35.23.3 |
| | Tau | | BACE1 | | | L100 | | | |

### Example 8. Biacore Assessment of Bispecific Proteins

### Biacore Assessment of BACE1/Tau Bispecific Proteins Comprising TfR-Binding Fc Polypeptides

[0398] The affinities of BACE1/Tau bispecific proteins comprising TfR-binding Fc polypeptides with its antigens were determined by surface plasmon resonance using a Biacore™ 8K instrument. Bispecific proteins were captured using Human Fab Capture Kit (GE, #28-9583-25) on Biacore Series S CM5 sensor chip (GE, #29149604). Serial 3-fold dilutions of each antigen (BACE1: 300, 100, 33.3, 11.1, 0 nM; Tau: 30, 10, 3.3, 1.1, 0.4 nM) were injected at a flow rate of 30 μL/min. The binding of the antigens to captured Fc polypeptide comprising a TfR binding site was monitored for 300 seconds and then their dissociation was monitored for 600+ seconds in HBS-EP+ running buffer. Binding response was corrected by subtracting the RU from a blank flow cell. A 1:1 Languir model of simultaneous fitting of kₒₙ and k_{off} was used for kinetics analysis. Binding data for bispecific proteins disclosed in Tables 12-14 is shown in Tables 15-17 below. An anti-BACE1/RSV bispecific protein having a TfR binding site (Clone 35.23.4), knobs-into-holes, and L234A/L235A substitutions (“C1”) was used as a control.

### Biacore Assessment of TfR Binding

[0399] The affinity of bispecific proteins for recombinant TfR apical domain was determined by surface plasmon resonance using a Biacore™ 8K instrument in 1×HBS-EP+ running buffer (GE Healthcare, BR100669). Biacore™ Series S CM5 sensor chips were immobilized with anti-human Fab (human Fab capture kit from GE Healthcare, 28958325). A fusion protein comprising Fab and an Fc polypeptide comprising a TfR binding site was captured for 30 seconds on each flow cell and serial 3-fold dilutions of human (2, 0.66, 0.22, 0.073, 0.24, and 0 uM) apical domain were injected at a flow rate of 30 μL/min using single cycle kinetics method. Each sample was analyzed with a 80-second association and a 3-minute dissociation. After each cycle, the chip was regenerated using 10 mM glycine-HCl (pH 2.1) for 30 seconds at 50 ul/min. Binding response was corrected by subtracting the RU from a reference flow cell. Steady-state affinities were obtained by fitting the response at equilibrium against the concentration using Biacore™ 8K Evaluation Software. To determine the affinity of the bispecific proteins for recombinant TfR ectodomain (ECD), Biacore™ Series S CM5 sensor chips were immobilized with streptavidin. Biotinylated 0.5 ug/ml human TfR ECD was captured for 45 seconds on each flow cell at 10 ul/min, and serial 3-fold dilutions of bispecific proteins buffer-exchanged in BBS were injected at a flow rate of 30 ul/min. Each sample was analyzed using single cycle kinetics as described above. Binding data for bispecific proteins disclosed in Tables 12-14 is shown in Tables 15-17 below. C1 was used as a control.

TABLE 15
Biacore Binding Data for Bispecific Proteins
Having Fab-Fc/scFv-Fc Architecture

| | Tau KD | hTfR apical |
|---|---|---|
| Construct # | (nM) | SSA (nM) |
| 1 | 1.8 | 370 |
| 2 | 1.6 | 390 |
| 3 | ND | ND |
| 4 | ND | ND |

| | BACE1 KD | hTfR apical | Tau KD |
|---|---|---|---|
| Construct # | (nM) | SSA (nM) | (pM) |
| C1 | 1.4 | 470 | ND |
| 5 | ND | ND | ND |
| 6 | 4.1 | 330 | ND |
| 7 | ND | ND | ND |
| 8 | no binding | 280 | ND |
| 9 | 2.4 | 350 | ND |
| 10 | 2.1 | 360 | 240 |
| 11 | 2.6 | 360 | ND |
| 12 | 2.7 | 360 | ND |

ND = Not Determined

TABLE 16
Biacore Binding Data for Bispecific Proteins
Having C-Terminal-Fc Architecture

| | BACE1 KD | hTfR apical |
|---|---|---|
| Construct # | (nM) | SSA (nM) |
| 13 | 13 | 510 |
| 14 | 12 | 430 |
| 15 | 40 | 280 |
| 16 | 4 | 370 |
| 17 | 11 | 320 |
| 18 | ND | ND |
| 19 | 21 | 360 |
| 20 | 9 | 290 |

| | BACE1 KD | hTfR apical | Tau KD |
|---|---|---|---|
| Construct # | (nM) | SSA (nM) | (pM) |
| C1 | 3.4 | 700 | ND |
| 21 | 8.9 | 470 | ND |
| 22 | 17 | 460 | ND |
| 23 | 11 | ND | ND |
| 24 | 7.8 | 440 | 420 |
| 25 | 8 | 270 | ND |
| 26 | 5 | ND | ND |
| 27 | 18 | 350 | ND |
| 28 | 26 | 210 | ND |
| 29 | 5.3 | 360 | ND |
| 30 | 4.6 | 450 | ND |
| 31 | 15 | 350 | ND |
| 32 | 20 | 340 | ND |

ND = Not Determined

TABLE 17
Biacore Binding Data for Bispecific Proteins
Having C-Terminal-scFv Architecture

| | BACE1 KD | hTfR apical |
|---|---|---|
| Construct # | (nM) | SSA (nM) |
| C1 | 3.4 | 700 |
| 38 | 4.2 | 560 |
| 39 | 3.6 | 610 |
| 40 | 3.3 | 570 |
| 41 | 3.3 | 550 |
| 42 | 3.2 | ND |
| 43 | 10.6 | 600 |
| 44 | 5.9 | 460 |
| 45 | 4.3 | 520 |

| | BACE1 KD | Tau KD | hTfR ECD |
|---|---|---|---|
| | (nM) | (pM) | SSA (nM) |
| 46 | 2.2 | 460 | 780 |
| 47 | ND | ND | ND |

| | BACE1 KD | hTfR apical | hTfR ECD |
|---|---|---|---|
| Construct # | (nM) | SSA (nM) | SSA (nM) |
| C1 | 1.1 | 520 | 380 |
| 48 | 1.5 | 460 | 1480 |
| 49 | 1.6 | 680 | 1540 |

| | BACE1 KD | hTfR apical | hTfR ECD | Tau KD |
|---|---|---|---|---|
| Construct # | (nM) | SSA (nM) | SSA (nM) | (pM) |
| C1 | 1.1 | 520 | 380 | ND |
| 60 | 0.6 | 210 | 870 | ND |
| 61 | ND | ND | ND | ND |
| 62 | 1.4 | 390 | 1490 | 240 |
| 63 | 4.4 | 250 | 1290 | ND |

ND = Not Determined

### Example 9. Quantification of BACE1 Inhibition Using CHO:huAPP Cells

### Culture Conditions

[0400] CHO:huAPP KI cells were generated at Genscript and maintained in 50% DMEM/50% F12 media (Gibco, 11320) with 10% FBS (Sigma F8317), 1× penicillin/streptomycin (Gibco 15140122), and 1× Genectin (Gibco 10131027) (referred to herein as “CHO media” (“CM”)).

### Cell Culture Treatments

[0401] CHO:huAPP cells (passage #4-18) were treated with various molecules (all chimeric molecules on a human IgG backbone). Molecules were first diluted in CM to a starting concentration of 1 or 2 μM and then diluted either 1:2 or 1:4 to generate a dilution series for measuring the dose response of each molecule. Medium of CHO:huAPP cells was entirely replaced with that containing experimental or control molecules. CHO:huAPP cells were then kept at 37° C. with 5% CO₂ for 24 hours. After 24 hours, media were collected for Aβ measurement by a HTFR assay.

### Aβ Quantification by HTFR

[0402] After 24 hours incubation of CHO:huAPP cells with experimental or control molecules, 100 μL of media was harvested. The molecule incubations were performed in duplicate and the Aβ1-40 measurements with technical duplicates. Measurements of human Aβ1-40 were conducted according to the Cisbio Aβ1-40 kit (Cisbio #62B40PEG). In brief: the kit provided two anti-Aβ1-40 antibodies that act as a FRET donor and receptor pair: one antibody was labeled with Eu3+-Cryptate (FRET donor) and the other with XL-665 (FRET receptor). Both antibodies were incubated with 5 μL of media, harvested from CHO:huAPP cultures, in a PerkinElmer OptiPlate 384 for 24 hours at 4° C. The plate was then read and Aβ1-40 concentration was calculated from a 665 nm/620 nm ratio.

[0403] Cellular BACE1 inhibition data for bispecific proteins disclosed in Tables 12-14 is shown in Tables 18-20 below. An anti-BACE1 antibody having a TfR binding site (Clone 35.23.4) (“C2”), an anti-BACE1/RSV bispecific protein having a TfR binding site (Clone 35.23.4) and L234A/L235A substitutions (“C3”), and a non-affinity matured anti-BACE1 lacking a TfR binding site or other Fc modifications (“C4”) were used as controls.

TABLE 18
Cellular BACE1 Inhibition for Bispecific Proteins
Having Fab-Fc/scFv-Fc Architecture

| | BACE1 Cellular | BACE1 Max | Concentration for |
|---|---|---|---|
| Construct # | IC50 (nM) | Inhibition (%) | 50% Inhibition (nM) |
| C2 | 35 | 69 | 99 |
| 6 | 6 | 58 | 42 |
| 9 | 18 | 70 | 37 |
| 10 | 8 | 62 | 35 |
| 11 | 3 | 63 | 14 |
| 12 | 11 | 67 | 27 |

TABLE 19
Cellular BACE1 Inhibition for Bispecific Proteins
Having C-Terminal-Fc Architecture

| | BACE1 Cellular | BACE1 Max | Concentration for |
|---|---|---|---|
| Construct # | IC50 (nM) | Inhibition (%) | 50% Inhibition (nM) |
| C3 | 58 | 67 | 157 |
| 14 | 481 | 35 | NA |
| 15 | 1215 | NA | NA |
| 16 | 554 | 65 | NA |
| 17 | 673 | 71 | 1382 |
| 19 | 61 | 57 | 427 |
| 20 | 126 | 60 | 558 |
| C2 | 23 | 73 | 57 |
| 24 | 18.5 | 59 | 124 |
| 30 | 151 | 66 | 378 |
| 31 | 144 | 66 | 487 |
| 32 | | | |
| C2 | 35 | 69 | 99 |
| 25 | 577 | 81 | 627 |
| 26 | 692 | 92 | 661 |
| 27 | 152 | 65 | 547 |
| 28 | 229 | 84 | 238 |

NA = Not Applicable

TABLE 20
Cellular BACE1 Inhibition for Bispecific Proteins
Having C-Terminal-scFv Architecture

| | BACE1 Cellular | BACE1 Max | Concentration for |
|---|---|---|---|
| Construct # | IC50 (nM) | Inhibition (%) | 50% Inhibition (nM) |
| C2 | 23 | 73 | 57 |
| 39 | 6 | 65 | 16 |
| 40 | 24 | 73 | 48 |
| 41 | 5 | 69 | 16 |
| 43 | 8 | 76 | 14 |
| 45 | 8 | 76 | 16 |
| C2 | 26 | 71 | 73 |
| 46 | 12 | 60 | 83 |
| C2 | 31 | 68 | 93 |
| 50 | 7 | 58 | 47 |
| C4 | 10 | 66 | 28 |
| 60 | 4 | 58 | 24 |
| 62 | 5 | 71 | 11 |
| 63 | 4 | 66 | 14 |

### Example 10. Pharmacokinetic Properties of BACE-Tau Bispecific Proteins Having TfR-Binding Fc Polypeptide

[0404] This example describes the characterization of pharmacokinetic properties of BACE1-Tau bispecific proteins having TfR-binding Fc polypeptides using mouse models.

### Wild-Type Mouse PK Evaluation

[0405] For in vivo pharmacokinetic (PK) evaluation, 6-8 week-old female wild-type C57B16 mice were intravenously dosed at 10 mg/kg with a BACE1-Tau bispecific protein having a Fab-Fc/scFv-Fc architecture (construct 10 as described in Table 12), a BACE1-Tau bispecific protein having a C-terminal Fv architecture (constructs 20 and 24, as described in Table 13), a BACE1-Tau bispecific protein having a C-terminal scFv architecture with an scFv fused to one Fc polypeptide (constructs 41, 45, and 46, as described in Table 14), a BACE1-Tau bispecific protein having a C-terminal architecture with an scFv fused to each Fc polypeptide (construct 62, as described in Table 14), an anti-BACE1 control antibody (Ab153), an anti-RSV negative control antibody (Ab122), or an anti-Tau antibody comprising a TfR-binding Fc polypeptide (ATV:Tau). In-life plasma was taken via submandibular-bleeds at the timepoints indicated in FIG. 4A or FIG. 5A. Blood was collected in EDTA plasma tubes, spun at 14,000 rpm for 5 minutes, and then plasma was isolated for subsequent analysis.

[0406] FIGS. 4A and 4B show the data from wild-type mouse PK evaluation of BACE1-Tau C-terminal Fv construct 20, BACE1-Tau C-terminal scFv constructs 41 and 45, and anti-BACE1 control antibody (Ab153). As shown in FIG. 4B, each of the BACE1-Tau bispecific proteins had faster clearance than the control anti-BACE1 antibody.

[0407] FIGS. 5A and 5B show the data from wild-type mouse PK evaluation of BACE1-Tau Fab-Fc/scFv-Fc construct 10, BACE1-Tau C-terminal Fv construct 24, BACE1-Tau C-terminal scFv construct 46, BACE1-Tau C-terminal scFv construct 62, anti-RSV negative control antibody (Ab122), and anti-Tau antibody comprising a TfR-binding Fc polypeptide (ATV:Tau). As shown in FIG. 5B, each of the BACE1-Tau bispecific proteins had acceptable clearance values within 1.5-2 fold of an anti-RSV negative control antibody (Ab122) and within 1.5 fold of a control anti-Tau antibody comprising a TfR-binding Fc polypeptide.

hTfR^{ms/hu} KI Mouse PK Evaluation

[0408] Human TfR knock-in (TfR^{ms/hu} KI) mice were also used for in vivo pharmacokinetic (PK) evaluation. Such a model can be used, for example, to measure and/or compare maximum brain concentration (Cₘₐₓ) and/or brain exposure, e.g., to determine whether Cₘₐₓ is increased and/or brain exposure is prolonged. TfR^{ms/hu} KI mice were generated using CRISPR/Cas9 technology to express human Tfrc apical domain within the murine Tfrc gene; the resulting chimeric TfR was expressed in vivo under the control of the endogenous promoter. As described in International Patent Application No. PCT/US2018/018302, which is incorporated by reference in its entirety herein, C57B16 mice were used to generate a knock-in of the human apical TfR mouse line via pronuclear microinjection into single cell embryos, followed by embryo transfer to pseudo pregnant females. Specifically, Cas9, single guide RNAs and a donor DNA were introduced into the embryos. The donor DNA comprised a human apical domain coding sequence that had been codon optimized for expression in mouse. The apical domain coding sequence was flanked with a left and a right homology arm. The donor sequence was designed such that the apical domain was inserted after the fourth mouse exon, and was immediately flanked at the 3′ end by the ninth mouse exon. A founder male from the progeny of the female that received the embryos was bred to wild-type females to generate F1 heterozygous mice. Homozygous mice were subsequently generated from breeding of F1 generation heterozygous mice.

[0409] For PK analysis, 6-8 week-old female hTfR^{ms/hu} KI mice were intravenously dosed at 10 mg/kg with a BACE1-Tau bispecific protein having a C-terminal Fv architecture (construct 24, as described in Table 13), a BACE1-Tau bispecific protein having a C-terminal scFv architecture with an scFv fused to one Fc polypeptide (construct 46, as described in Table 14), a BACE1-Tau bispecific protein having a C-terminal scFv architecture with an scFv fused to each Fc polypeptide (construct 62, as described in Table 14), an anti-RSV negative control antibody (Ab122), an anti-Tau 1C7 antibody (anti-Tau), or an anti-Tau antibody comprising a TfR-binding Fc polypeptide (ATV:Tau). In-life plasma was taken via submandibular-bleeds at the timepoints indicated in FIG. 6A. Blood was collected in EDTA plasma tubes, spun at 14,000 rpm for 5 minutes, and then plasma was isolated for subsequent analysis.

[0410] As shown in FIGS. 6A and 6B, each of the BACE1-Tau bispecific proteins tested in the hTfR^{ms/hu} KI mouse model exhibited faster clearance than the anti-RSV negative control antibody (Ab122) or anti-Tau 1C7 antibody due to TfR binding and target-mediated clearance, and had acceptable clearance values within 2-fold of a control anti-Tau antibody comprising a TfR-binding Fc polypeptide.

### PS19/hTfR^{ms/hu} KI Mouse PK Evaluation

[0411] The pharmacokinetic properties of additional constructs were also evaluated in vivo in PS19/TfR^{ms/hu} KI mice. PS19/TfR^{ms/hu} KI mice were generated to express human Tfrc apical domain within the murine Tfrc gene and a mutant Tau gene that encodes a mutant human Tau protein comprising the amino acid substitution P272S relative to the sequence of SEQ ID NO:398 by crossing the PS19 mice to the TfR^{ms/hu} KI mice to generate a colony of PS19 HEMI (hemizygous) TfR^{ms/hu} HOM (homozygous) mice. Male PS19 HEMI TfR^{ms/hu} KI HOM mice are crossed to female TfR^{ms/hu} HOM mice to maintain the colony.

[0412] PS19/TfR^{ms/hu} KI mice were systemically dosed one time via the tail vein at 50 mg/kg. Prior to perfusion with PBS, blood was collected in EDTA plasma tubes via cardiac puncture and spun at 14,000 rpm for 5 minutes. Plasma was then isolated for subsequent PK/PD analysis. Brains were extracted after perfusion and hemi-brains were isolated for homogenization in 10× by tissue weight of 1% NP-40 in PBS (for PK) or 5 M GuHCl (for PD).

[0413] Total antibody concentrations in mouse plasma and brain lysates were quantified using a generic human Ig sandwich ELISA. A 384-well MaxiSorp plate was coated overnight with 1 μg/mL anti-huFc donkey polyclonal (Jackson Immunoresearch). Following incubation with diluted plasma or NP-40 brain lysate, an anti-huFc donkey antibody conjugated to HRP (Jackson Immunoresearch) was added as the detection reagent. The standard curves for each individual molecule, from 2 nM to 2.7 pM using 3-fold dilutions, were fit using a five-parameter logistic regression. The pharmacokinetic properties of constructs 28, 46, 62, and 75-77 are shown in FIGS. 7A-7I.

### Human IgG ELISA, BACE1 Antigen Capture, and Tau Antigen Capture ELISAs

[0414] Antibody concentrations in mouse plasma were quantified using three sandwich ELISA formats: anti-huFc, BACE1 antigen capture, and Tau antigen capture. A 384-well MaxiSorp plate was coated overnight with either 1 μg/mL anti-huFc donkey polyclonal (Jackson Immunoresearch), 2 μg/mL huBACE1 (R&D Systems), or 1 μg/mL recombinant huTau. Full length (441 amino acid) recombinant tau (r-tau) was produced in E. coli BL21(DE3) cells by CEPTER Biopartners. r-tau was originally produced with a His6-Smt3 tag which was cleaved and removed during purification.

[0415] Following incubation with diluted plasma, all ELISA formats used an anti-huFc donkey antibody conjugated to HRP (Jackson Immunoresearch) as the detection reagent. The standard curves for each individual molecule, from 4 nM to 0.97 pM using a 4-fold dilutions, were fit using a five-parameter logistic regression. The correlation graphs were constructed in GraphPad Prism and the software used to fit the data using linear regression to calculate the slope along with the Pearson correlation coefficient. As shown in FIGS. 4A and 4B, the strong correlations between both the BACE1 (FIGS. 4C and 4D) and Tau (FIGS. 4E and 4F) antigen capture with the Fc detection indicated that the molecules are largely intact throughout the pharmacokinetic time course.

### Example 11. Thermal Stability

[0416] Dynamic light scattering (DLS) measurements were collected by DynaPro Plate Reader III (Wyatt Technology). Samples were prepared at 1.0 mg/mL in PBS at pH 7.4 and the temperature was continuously ramped from 40° C. to 80° C. at a rate of 0.25° C./min. Each measurement was collected with 10 DLS acquisitions with 1 second acquisition time. Laser power was set at 20%. Data was analyzed using Dynamics V7.8.2.18 to determine Tₒₙₛₑₜ and T_{agg} values as shown in Table 21 below.

TABLE 21
Thermal Stability

| | T onset | T agg |
|---|---|---|
| Construct | (° C.) | (° C.) |
| Construct 46 | 57.75 | 64.37 |
| Construct 62 | 52.56 | 58.25 |
| Construct 28 | 62.32 | 66.43 |
| Clone35.23A:1C7-1C7^{HCv2LCv8} | 63.11 | 66.10 |

### Example 12. Antibody Treatment of CHO-huAPP Cells and Aβ40 Quantification by ELISA

[0417] CHOK1-huAPP cells (15,000/well) were plated on tissue culture-treated 96-well plates (Thermo Sci Nunclon Delta Surface) in 100 μL/well DMEM/F12 media supplemented with 10% FBS. After plating, cells recovered overnight at 37° C. with 5% CO₂. For the treatments, antibodies were first serially-diluted in media at 1000 to 0.06 nM (4-fold dilutions) and 1 respectively. The media was entirely replaced with 100 μL diluted treatment with duplicate wells for each condition. Cells were then kept at 37° C. with 5% CO₂ for 24 h. Following the 24 h treatment, the media was collected for Aβ40 measurement. Measurements of human Aβ1-40 (from the human neuron cultures) were conducted according to the Cisbio Aβ1-40 ELISA kit (Cisbio #62B40PEG). The kit provided two anti-Aβ1-40 antibodies that act as a FRET donor and receptor pair: one antibody was labeled with Eu3⁺-Cryptate (FRET donor) and the other with XL-665 (FRET receptor). Both antibodies were incubated with 5 μL of media, harvested from human neurons cultures, and placed in a PerkinElmer OptiPlate 384 for 24 h at 4° C. The plate was then read, and Aβ1-40 concentration was calculated from a 665 nm/620 nm ratio.

[0418] As shown in FIGS. 8A and 8B, all versions of 2H8 fused to Clone35.23.4:1C7-1C7 reduced human Aβ in a dose-dependent manner as compared to untreated control. Control IgG (Ab122) had no effect on Aβ reduction. Line graphs represent mean±SEM, n=2 independent experiments.

### Example 13. Quantification of Aβ40 in PS19/TfR^{ms/hu} KI Mice

[0419] PS19/TfR^{ms/hu} KI mice were systemically dosed one time via tail vein at 50 mg/kg. Brains were extracted after perfusion and hemi-brains were isolated for homogenization in 10× by tissue weight of 1% NP-40 in PBS (for PK) or 5 M GuHCl (for PD).

[0420] Mouse Aβ40 levels in brain lysate and CSF were measured using a sandwich ELISA. A 384-well MaxiSorp plate was coated overnight with a polyclonal capture antibody specific for the C-terminus of the Aβ40 peptide (Millipore #ABN240). Casein-diluted guanidine brain lysates were further diluted 1:2 on the ELISA plate and added concurrently with the detection antibody, biotinylated M3.2. CSF was analyzed at a 1:20 dilution. Samples were incubated overnight at 4° C. prior to addition of streptavidin-HRP followed by TMB substrate. The standard curve, 0.78-50 pg/mL msAβ40, was fit using a four-parameter logistic regression. FIGS. 9A-9E show the quantifications of brain and CSF Aβ40 in PS19/hTfR^{ms/hu} KI mice following the intravenous injection of construct 28, 46, 62, 75, 76, or 77. The constructs reduced human Aβ as compared to untreated control. Control IgG (Ab122) had no effect on Aβ reduction.

[0421] The amino acid substitutions for each clone described in the Tables (e.g., Table 9) dictate the amino acid substitutions at the register positions of that clone over the amino acids found in the sequence set forth in the Sequence Listing, in case of discrepancy.

[0422] It is understood that the examples and embodiments described herein are for illustrative purposes only and that various modifications or changes in light thereof will be suggested to persons skilled in the art and are to be included within the spirit and purview of this application and scope of the appended claims. The sequences of the sequence accession numbers cited herein are hereby incorporated by reference.

TABLE 22
Informal Sequence Listing

| SEQ ID | | |
|---|---|---|
| NO | Sequence | Description |
| 1 | APELLGGPSVFLFPPKPKDTLMISRTPEVTCVVVDVSHEDPEVKFNW | Wild-type human Fc |
| | YVDGVEVHNAKTKPREEQYNSTYRVVSVLTVLHQDWLNGKEYKC | sequence |
| | KVSNKALPAPIEKTISKAKGQPREPQVYTLPPSRDELTKNQVSLTCL | |
| | VKGFYPSDIAVEWESNGQPENNYKTTPPVLDSDGSFFLYSKLTVDKS | |
| | RWQQGNVFSCSVMHEALHNHYTQKSLSLSPGK | |
| 2 | APELLGGPSVFLFPPKPKDTLMISRTPEVTCVVVDVSHEDPEVKFNW | CH2 domain sequence, |
| | YVDGVEVHNAKTKPREEQYNSTYRVVSVLTVLHQDWLNGKEYKC | positions 231-340 (EU |
| | KVSNKALPAPIEKTISKAK | index numbering) |
| 3 | GQPREPQVYTLPPSRDELTKNQVSLTCLVKGFYPSDIAVEWESNGQP | CH3 domain sequence, |
| | ENNYKTTPPVLDSDGSFFLYSKLTVDKSRWQQGNVFSCSVMHEALH | positions 341-447 (EU |
| | NHYTQKSLSLSPGK | index numbering) |
| 4 | APELLGGPSVFLFPPKPKDTLMISRTPEVTCVVVDVSHEDPEVKFNW | Clone CH3C.1 |
| | YVDGVEVHNAKTKPREEQYNSTYRVVSVLTVLHQDWLNGKEYKC | (Clone CH3C.18.4) |
| | KVSNKALPAPIEKTISKAKGQPREPQVYTLPPSRDELTKNQVSLTCL | |
| | VKGFYPSDIAVEWESLGLVWVGYKTTPPVLDSDGSFFLYSKLTVAK | |
| | STWQQGWVFSCSVMHEALHNHYTQKSLSLSPGK | |
| 5 | APELLGGPSVFLFPPKPKDTLMISRTPEVTCVVVDVSHEDPEVKFNW | Clone CH3C.2 |
| | YVDGVEVHNAKTKPREEQYNSTYRVVSVLTVLHQDWLNGKEYKC | (Clone CH3C.18.2) |
| | KVSNKALPAPIEKTISKAKGQPREPQVYTLPPSRDELTKNQVSLTCL | |
| | VKGFYPSDIAVEWESYGTVWSHYKTTPPVLDSDGSFFLYSKLTVSKS | |
| | EWQQGYVFSCSVMHEALHNHYTQKSLSLSPGK | |
| 6 | APELLGGPSVFLFPPKPKDTLMISRTPEVTCVVVDVSHEDPEVKFNW | Clone CH3C.3 |
| | YVDGVEVHNAKTKPREEQYNSTYRVVSVLTVLHQDWLNGKEYKC | (Clone CH3C.18.3) |
| | KVSNKALPAPIEKTISKAKGQPREPQVYTLPPSRDELTKNQVSLTCL | |
| | VKGFYPSDIAVEWESYGTEWSQYKTTPPVLDSDGSFFLYSKLTVEKS | |
| | DWQQGHVFSCSVMHEALHNHYTQKSLSLSPGK | |
| 7 | APELLGGPSVFLFPPKPKDTLMISRTPEVTCVVVDVSHEDPEVKFNW | Clone CH3C.4 |
| | YVDGVEVHNAKTKPREEQYNSTYRVVSVLTVLHQDWLNGKEYKC | (Clone CH3C.18.1) |
| | KVSNKALPAPIEKTISKAKGQPREPQVYTLPPSRDELTKNQVSLTCL | |
| | VKGFYPSDIAVEWESVGTPWALYKTTPPVLDSDGSFFLYSKLTVLKS | |
| | EWQQGWVFSCSVMHEALHNHYTQKSLSLSPGK | |
| 8 | APELLGGPSVFLFPPKPKDTLMISRTPEVTCVVVDVSHEDPEVKFNW | Clone CH3C.17 |
| | YVDGVEVHNAKTKPREEQYNSTYRVVSVLTVLHQDWLNGKEYKC | |
| | KVSNKALPAPIEKTISKAKGQPREPQVYTLPPSRDELTKNQVSLTCL | |
| | VKGFYPSDIAVEWESYGTVWSKYKTTPPVLDSDGSFFLYSKLTVSKS | |
| | EWQQGFVFSCSVMHEALHNHYTQKSLSLSPGK | |
| 9 | APELLGGPSVFLFPPKPKDTLMISRTPEVTCVVVDVSHEDPEVKFNW | Clone CH3C.18 |
| | YVDGVEVHNAKTKPREEQYNSTYRVVSVLTVLHQDWLNGKEYKC | (Clone CH3C.18.1.18) |
| | KVSNKALPAPIEKTISKAKGQPREPQVYTLPPSRDELTKNQVSLTCL | |
| | VKGFYPSDIAVEWESLGHVWAVYKTTPPVLDSDGSFFLYSKLTVPK | |
| | STWQQGWVFSCSVMHEALHNHYTQKSLSLSPGK | |
| 10 | APELLGGPSVFLFPPKPKDTLMISRTPEVTCVVVDVSHEDPEVKFNW | Clone CH3C.21 |
| | YVDGVEVHNAKTKPREEQYNSTYRVVSVLTVLHQDWLNGKEYKC | |
| | KVSNKALPAPIEKTISKAKGQPREPQVYTLPPSRDELTKNQVSLTCL | |
| | VKGFYPSDIAVEWESLGLVWVGYKTTPPVLDSDGSFFLYSKLTVPK | |
| | STWQQGWVFSCSVMHEALHNHYTQKSLSLSPGK | |
| 11 | APELLGGPSVFLFPPKPKDTLMISRTPEVTCVVVDVSHEDPEVKFNW | Clone CH3C.25 |
| | YVDGVEVHNAKTKPREEQYNSTYRVVSVLTVLHQDWLNGKEYKC | |
| | KVSNKALPAPIEKTISKAKGQPREPQVYTLPPSRDELTKNQVSLTCL | |
| | VKGFYPSDIAVEWESMGHVWVGYKTTPPVLDSDGSFFLYSKLTVD | |
| | KSTWQQGWVFSCSVMHEALHNHYTQKSLSLSPGK | |
| 12 | APELLGGPSVFLFPPKPKDTLMISRTPEVTCVVVDVSHEDPEVKFNW | Clone CH3C.34 |
| | YVDGVEVHNAKTKPREEQYNSTYRVVSVLTVLHQDWLNGKEYKC | |
| | KVSNKALPAPIEKTISKAKGQPREPQVYTLPPSRDELTKNQVSLTCL | |
| | VKGFYPSDIAVEWESLGLVWVFSKTTPPVLDSDGSFFLYSKLTVPKS | |
| | TWQQGWVFSCSVMHEALHNHYTQKSLSLSPGK | |
| 13 | APELLGGPSVFLFPPKPKDTLMISRTPEVTCVVVDVSHEDPEVKFNW | Clone CH3C.35 |
| | YVDGVEVHNAKTKPREEQYNSTYRVVSVLTVLHQDWLNGKEYKC | |
| | KVSNKALPAPIEKTISKAKGQPREPQVYTLPPSRDELTKNQVSLTCL | |
| | VKGFYPSDIAVEWESYGTEWSSYKTTPPVLDSDGSFFLYSKLTVTKS | |
| | EWQQGFVFSCSVMHEALHNHYTQKSLSLSPGK | |
| 14 | APELLGGPSVFLFPPKPKDTLMISRTPEVTCVVVDVSHEDPEVKFNW | Clone CH3C.44 |
| | YVDGVEVHNAKTKPREEQYNSTYRVVSVLTVLHQDWLNGKEYKC | |
| | KVSNKALPAPIEKTISKAKGQPREPQVYTLPPSRDELTKNQVSLTCL | |
| | VKGFYPSDIAVEWESYGTEWSNYKTTPPVLDSDGSFFLYSKLTVSKS | |
| | EWQQGFVFSCSVMHEALHNHYTQKSLSLSPGK | |
| 15 | APELLGGPSVFLFPPKPKDTLMISRTPEVTCVVVDVSHEDPEVKFNW | Clone CH3C.51 |
| | YVDGVEVHNAKTKPREEQYNSTYRVVSVLTVLHQDWLNGKEYKC | |
| | KVSNKALPAPIEKTISKAKGQPREPQVYTLPPSRDELTKNQVSLTCL | |
| | VKGFYPSDIAVEWESLGHVWVGYKTTPPVLDSDGSFFLYSKLTVSK | |
| | SEWQQGWVFSCSVMHEALHNHYTQKSLSLSPGK | |
| 16 | APELLGGPSVFLFPPKPKDTLMISRTPEVTCVVVDVSHEDPEVKFNW | Clone CH3C.3.1-3 |
| | YVDGVEVHNAKTKPREEQYNSTYRVVSVLTVLHQDWLNGKEYKC | (Clone CH3C.18.3.1-3) |
| | KVSNKALPAPIEKTISKAKGQPREPQVYTLPPSRDELTKNQVSLTCL | |
| | VKGFYPSDIAVEWESLGHVWVATKTTPPVLDSDGSFFLYSKLTVPK | |
| | STWQQGWVFSCSVMHEALHNHYTQKSLSLSPGK | |
| 17 | APELLGGPSVFLFPPKPKDTLMISRTPEVTCVVVDVSHEDPEVKFNW | Clone CH3C.3.1-9 |
| | YVDGVEVHNAKTKPREEQYNSTYRVVSVLTVLHQDWLNGKEYKC | (Clone CH3C.18.3.1-9) |
| | KVSNKALPAPIEKTISKAKGQPREPQVYTLPPSRDELTKNQVSLTCL | |
| | VKGFYPSDIAVEWESLGPVWVHTKTTPPVLDSDGSFFLYSKLTVPKS | |
| | TWQQGWVFSCSVMHEALHNHYTQKSLSLSPGK | |
| 18 | APELLGGPSVFLFPPKPKDTLMISRTPEVTCVVVDVSHEDPEVKFNW | Clone CH3C.3.2-5 |
| | YVDGVEVHNAKTKPREEQYNSTYRVVSVLTVLHQDWLNGKEYKC | (Clone CH3C.18.3.2-5) |
| | KVSNKALPAPIEKTISKAKGQPREPQVYTLPPSRDELTKNQVSLTCL | |
| | VKGFYPSDIAVEWESLGHVWVDQKTTPPVLDSDGSFFLYSKLTVPK | |
| | STWQQGWVFSCSVMHEALHNHYTQKSLSLSPGK | |
| 19 | APELLGGPSVFLFPPKPKDTLMISRTPEVTCVVVDVSHEDPEVKFNW | Clone CH3C.3.2-19 |
| | YVDGVEVHNAKTKPREEQYNSTYRVVSVLTVLHQDWLNGKEYKC | (Clone CH3C.18.3.2-19) |
| | KVSNKALPAPIEKTISKAKGQPREPQVYTLPPSRDELTKNQVSLTCL | |
| | VKGFYPSDIAVEWESLGHVWVNQKTTPPVLDSDGSFFLYSKLTVPK | |
| | STWQQGWVFSCSVMHEALHNHYTQKSLSLSPGK | |
| 20 | APELLGGPSVFLFPPKPKDTLMISRTPEVTCVVVDVSHEDPEVKFNW | Clone CH3C.3.2-1 |
| | YVDGVEVHNAKTKPREEQYNSTYRVVSVLTVLHQDWLNGKEYKC | (Clone CH3C.18.3.2-1) |
| | KVSNKALPAPIEKTISKAKGQPREPQVYTLPPSRDELTKNQVSLTCL | |
| | VKGFYPSDIAVEWESLGHVWVNFKTTPPVLDSDGSFFLYSKLTVPKS | |
| | TWQQGWVFSCSVMHEALHNHYTQKSLSLSPGK | |
| 21 | APELLGGPSVFLFPPKPKDTLMISRTPEVTCVVVDVSHEDPEVKFNW | Clone CH3C.18.E153W |
| | YVDGVEVHNAKTKPREEQYNSTYRVVSVLTVLHQDWLNGKEYKC | (CH3C.35.13) |
| | KVSNKALPAPIEKTISKAKGQPREPQVYTLPPSRDELTKNQVSLTCL | |
| | VKGFYPSDIAVWWESLGHVWAVYKTTPPVLDSDGSFFLYSKLTVPK | |
| | STWQQGWVFSCSVMHEALHNHYTQKSLSLSPGK | |
| 22 | APELLGGPSVFLFPPKPKDTLMISRTPEVTCVVVDVSHEDPEVKFNW | Clone CH3C.18.K165Q |
| | YVDGVEVHNAKTKPREEQYNSTYRVVSVLTVLHQDWLNGKEYKC | (CH3C.35.14) |
| | KVSNKALPAPIEKTISKAKGQPREPQVYTLPPSRDELTKNQVSLTCL | |
| | VKGFYPSDIAVEWESLGHVWAVYQTTPPVLDSDGSFFLYSKLTVPK | |
| | STWQQGWVFSCSVMHEALHNHYTQKSLSLSPGK | |
| 23 | APELLGGPSVFLFPPKPKDTLMISRTPEVTCVVVDVSHEDPEVKFNW | Clone CH3C.18.E153W. |
| | YVDGVEVHNAKTKPREEQYNSTYRVVSVLTVLHQDWLNGKEYKC | K165Q (CH3C.35.15) |
| | KVSNKALPAPIEKTISKAKGQPREPQVYTLPPSRDELTKNQVSLTCL | |
| | VKGFYPSDIAVWWESLGHVWAVYQTTPPVLDSDGSFFLYSKLTVPK | |
| | STWQQGWVFSCSVMHEALHNHYTQKSLSLSPGK | |
| 24 | APELLGGPSVFLFPPKPKDTLMISRTPEVTCVVVDVSHEDPEVKFNW | Clone CH3C.35.E153W |
| | YVDGVEVHNAKTKPREEQYNSTYRVVSVLTVLHQDWLNGKEYKC | (CH3C.35.19) |
| | KVSNKALPAPIEKTISKAKGQPREPQVYTLPPSRDELTKNQVSLTCL | |
| | VKGFYPSDIAVWWESYGTEWSSYKTTPPVLDSDGSFFLYSKLTVTK | |
| | SEWQQGFVFSCSVMHEALHNHYTQKSLSLSPGK | |
| 25 | APELLGGPSVFLFPPKPKDTLMISRTPEVTCVVVDVSHEDPEVKFNW | Clone CH3C.35.S188E |
| | YVDGVEVHNAKTKPREEQYNSTYRVVSVLTVLHQDWLNGKEYKC | (CH3C.35.20) |
| | KVSNKALPAPIEKTISKAKGQPREPQVYTLPPSRDELTKNQVSLTCL | |
| | VKGFYPSDIAVEWESYGTEWSSYKTTPPVLDSDGSFFLYSKLTVTKE | |
| | EWQQGFVFSCSVMHEALHNHYTQKSLSLSPGK | |
| 26 | APELLGGPSVFLFPPKPKDTLMISRTPEVTCVVVDVSHEDPEVKFNW | Clone CH3C.35.E153W. |
| | YVDGVEVHNAKTKPREEQYNSTYRVVSVLTVLHQDWLNGKEYKC | S188E (CH3C.35.21) |
| | KVSNKALPAPIEKTISKAKGQPREPQVYTLPPSRDELTKNQVSLTCL | |
| | VKGFYPSDIAVWWESYGTEWSSYKTTPPVLDSDGSFFLYSKLTVTK | |
| | EEWQQGFVFSCSVMHEALHNHYTQKSLSLSPGK | |
| 27 | APELLGGPSVFLFPPKPKDTLMISRTPEVTCVVVDVSHEDPEVKFNW | Clone CH3C.35.N163 |
| | YVDGVEVHNAKTKPREEQYNSTYRVVSVLTVLHQDWLNGKEYKC | |
| | KVSNKALPAPIEKTISKAKGQPREPQVYTLPPSRDELTKNQVSLTCL | |
| | VKGFYPSDIAVEWESYGTEWSNYKTTPPVLDSDGSFFLYSKLTVTKS | |
| | EWQQGFVFSCSVMHEALHNHYTQKSLSLSPGK | |
| 28 | APELLGGPSVFLFPPKPKDTLMISRTPEVTCVVVDVSHEDPEVKFNW | Clone CH3C.35.K165Q |
| | YVDGVEVHNAKTKPREEQYNSTYRVVSVLTVLHQDWLNGKEYKC | |
| | KVSNKALPAPIEKTISKAKGQPREPQVYTLPPSRDELTKNQVSLTCL | |
| | VKGFYPSDIAVEWESYGTEWSSYQTTPPVLDSDGSFFLYSKLTVTKS | |
| | EWQQGFVFSCSVMHEALHNHYTQKSLSLSPGK | |
| 29 | APELLGGPSVFLFPPKPKDTLMISRTPEVTCVVVDVSHEDPEVKFNW | Clone CH3C.35.N163. |
| | YVDGVEVHNAKTKPREEQYNSTYRVVSVLTVLHQDWLNGKEYKC | K165Q |
| | KVSNKALPAPIEKTISKAKGQPREPQVYTLPPSRDELTKNQVSLTCL | |
| | VKGFYPSDIAVEWESYGTEWSNYQTTPPVLDSDGSFFLYSKLTVTKS | |
| | EWQQGFVFSCSVMHEALHNHYTQKSLSLSPGK | |
| 30 | APELLGGPSVFLFPPKPKDTLMISRTPEVTCVVVDVSHEDPEVKFNW | Clone CH3B.1 |
| | YVDGVEVHNAKTKPREEQYNSTYRVVSVLTVLHQDWLNGKEYKC | |
| | KVSNKALPAPIEKTISKAKGQPRFDYVTTLPPSRDELTKNQVSLTCL | |
| | VKGFYPSDIAVEWESNGQPENNYKTTPPVLDSDGSFFLYSKLTVDKS | |
| | RWQQGNVFSCSVMHEALHNHYGFHDLSLSPGK | |
| 31 | APELLGGPSVFLFPPKPKDTLMISRTPEVTCVVVDVSHEDPEVKFNW | Clone CH3B.2 |
| | YVDGVEVHNAKTKPREEQYNSTYRVVSVLTVLHQDWLNGKEYKC | |
| | KVSNKALPAPIEKTISKAKGQPRFDMVTTLPPSRDELTKNQVSLTCL | |
| | VKGFYPSDIAVEWESNGQPENNYKTTPPVLDSDGSFFLYSKLTVDKS | |
| | RWQQGNVFSCSVMHEALHNHYGFHDLSLSPGK | |
| 32 | APELLGGPSVFLFPPKPKDTLMISRTPEVTCVVVDVSHEDPEVKFNW | Clone CH3B.3 |
| | YVDGVEVHNAKTKPREEQYNSTYRVVSVLTVLHQDWLNGKEYKC | |
| | KVSNKALPAPIEKTISKAKGQPRFEYVTTLPPSRDELTKNQVSLTCLV | |
| | KGFYPSDIAVEWESNGQPENNYKTTPPVLDSDGSFFLYSKLTVDKSR | |
| | WQQGNVFSCSVMHEALHNHYGFHDLSLSPGK | |
| 33 | APELLGGPSVFLFPPKPKDTLMISRTPEVTCVVVDVSHEDPEVKFNW | Clone CH3B.4 |
| | YVDGVEVHNAKTKPREEQYNSTYRVVSVLTVLHQDWLNGKEYKC | |
| | KVSNKALPAPIEKTISKAKGQPRFEMVTTLPPSRDELTKNQVSLTCL | |
| | VKGFYPSDIAVEWESNGQPENNYKTTPPVLDSDGSFFLYSKLTVDKS | |
| | RWQQGNVFSCSVMHEALHNHYGFHDLSLSPGK | |
| 34 | APELLGGPSVFLFPPKPKDTLMISRTPEVTCVVVDVSHEDPEVKFNW | Clone CH3B.5 |
| | YVDGVEVHNAKTKPREEQYNSTYRVVSVLTVLHQDWLNGKEYKC | |
| | KVSNKALPAPIEKTISKAKGQPRFELVTTLPPSRDELTKNQVSLTCLV | |
| | KGFYPSDIAVEWESNGQPENNYKTTPPVLDSDGSFFLYSKLTVDKSR | |
| | WQQGNVFSCSVMHEALHNHYGFHDLSLSPGK | |
| 35 | APELLGGPSVFLFPPKPKDTLMISRTPEVTCVVVDVSHEDPEVKFNW | Clone CH3B.6 |
| | YVDGVEVHNAKTKPREEQYNSTYRVVSVLTVLHQDWLNGKEYKC | |
| | KVSNKALPAPIEKTISKAKGQPRFEIVTTLPPSRDELTKNQVSLTCLV | |
| | KGFYPSDIAVEWESNGQPENNYKTTPPVLDSDGSFFLYSKLTVDKSR | |
| | WQQGNVFSCSVMHEALHNHYGFHDLSLSPGK | |
| 36 | APELLGGPSVFLFPPKPKDTLMISRTPEVTCVVVDVSHEDPEVKFNW | Clone CH3B.7 |
| | YVDGVEVHNAKTKPREEQYNSTYRVVSVLTVLHQDWLNGKEYKC | |
| | KVSNKALPAPIEKTISKAKGQPRFDIVTTLPPSRDELTKNQVSLTCLV | |
| | KGFYPSDIAVEWESNGQPENNYKTTPPVLDSDGSFFLYSKLTVDKSR | |
| | WQQGNVFSCSVMHEALHNHYGFHDLSLSPGK | |
| 37 | APELLGGPSVFLFPPKPKDTLMISRTPEVTCVVVDVSHEDPEVKFNW | Clone CH3B .8 |
| | YVDGVEVHNAKTKPREEQYNSTYRVVSVLTVLHQDWLNGKEYKC | |
| | KVSNKALPAPIEKTISKAKGQPRFDYVYTLPPSRDELTKNQVSLTCL | |
| | VKGFYPSDIAVEWESNGQPENNYKTTPPVLDSDGSFFLYSKLTVDKS | |
| | RWQQGNVFSCSVMHEALHNHYGFHDLSLSPGK | |
| 38 | APELLGGPSVFLFPPKPKDTLMISRTPEVTCVVVDVSHEDPEVKFNW | Clone CH3B.9 |
| | YVDGVEVHNAKTKPREEQYNSTYRVVSVLTVLHQDWLNGKEYKC | |
| | KVSNKALPAPIEKTISKAKGQPRFGMVTTLPPSRDELTKNQVSLTCL | |
| | VKGFYPSDIAVEWESNGQPENNYKTTPPVLDSDGSFFLYSKLTVDKS | |
| | RWQQGNVFSCSVMHEALHNHYGFHDLSLSPGK | |
| 39 | APELLGGPSVFLFPPKPKDTLMISRTPEVTCVVVDVSHEDPEVKFNW | Clone CH3B.10 |
| | YVDGVEVHNAKTKPREEQYNSTYRVVSVLTVLHQDWLNGKEYKC | |
| | KVSNKALPAPIEKTISKAKGQPRFADVTILPPSRDELTKNQVSLTCLV | |
| | KGFYPSDIAVEWESNGQPENNYKTTPPVLDSDGSFFLYSKLTVDKSR | |
| | WQQGNVFSCSVMHEALHNHYGFYDLSLSPGK | |
| 40 | APELLGGPSVFLFPPKPKDTLMISRTPEVTCVVVDVSHEDPEVKFNW | Clone CH3B.11 |
| | YVDGVEVHNAKTKPREEQYNSTYRVVSVLTVLHQDWLNGKEYKC | |
| | KVSNKALPAPIEKTISKAKGQPRFGLVTTLPPSRDELTKNQVSLTCLV | |
| | KGFYPSDIAVEWESNGQPENNYKTTPPVLDSDGSFFLYSKLTVDKSR | |
| | WQQGNVFSCSVMHEALHNHYGFHDLSLSPGK | |
| 41 | APELLGGPSVFLFPPKPKDTLMISRTPEVTCVVVDVSHEDPEVKFNW | Clone CH3B.12 |
| | YVDGVEVHNAKTKPREEQYNSTYRVVSVLTVLHQDWLNGKEYKC | |
| | KVSNKALPAPIEKTISKAKGQPRFDYVTTLPPSRDELTKNQVSLTCL | |
| | VKGFYPSDIAVEWESNGQPENNYKTTPPVLDSDGSFFLYSKLTVDKS | |
| | RWQQGNVFSCSVMHEALHNHYGFSDLSLSPGK | |
| 42 | APELLGGPSVFLFPPKPKDTLMISRTPEVTCVVVDVSHEDPEVKFNW | Clone CH3B.13 |
| | YVDGVEVHNAKTKPREEQYNSTYRVVSVLTVLHQDWLNGKEYKC | |
| | KVSNKALPAPIEKTISKAKGQPRIDYVTTLPPSRDELTKNQVSLTCLV | |
| | KGFYPSDIAVEWESNGQPENNYKTTPPVLDSDGSFFLYSKLTVDKSR | |
| | WQQGNVFSCSVMHEALHNHYGFSDLSLSPGK | |
| 43 | APELLGGPSVFLFPPKPKDTLMISRTPEVTCVVVDVSHEDPEVKFNW | Clone CH3B.14 |
| | YVDGVEVHNAKTKPREEQYNSTYRVVSVLTVLHQDWLNGKEYKC | |
| | KVSNKALPAPIEKTISKAKGQPRFKDVTILPPSRDELTKNQVSLTCLV | |
| | KGFYPSDIAVEWESNGQPENNYKTTPPVLDSDGSFFLYSKLTVDKSR | |
| | WQQGNVFSCSVMHEALHNHYGFFDLSLSPGK | |
| 44 | APELLGGPSVFLFPPKPKDTLMISRTPEVTCVVVDVSHEDPEVKFNW | Clone CH3B.15 |
| | YVDGVEVHNAKTKPREEQYNSTYRVVSVLTVLHQDWLNGKEYKC | |
| | KVSNKALPAPIEKTISKAKGQPRFDLVTILPPSRDELTKNQVSLTCLV | |
| | KGFYPSDIAVEWESNGQPENNYKTTPPVLDSDGSFFLYSKLTVDKSR | |
| | WQQGNVFSCSVMHEALHNHYGFYDLSLSPGK | |
| 45 | APELLGGPSVFLFPPKPKDTLMISRTPEVTCVVVDVSHEDPEVKFNW | Clone CH3B.16 |
| | YVDGVEVHNAKTKPREEQYNSTYRVVSVLTVLHQDWLNGKEYKC | |
| | KVSNKALPAPIEKTISKAKGQPRIDYVTTLPPSRDELTKNQVSLTCLV | |
| | KGFYPSDIAVEWESNGQPENNYKTTPPVLDSDGSFFLYSKLTVDKSR | |
| | WQQGNVFSCSVMHEALHNHYGFSDLSLSPGK | |
| 46 | APELLGGPSVFLFPPKPKDTLMISRTPEVTCVVVDVSHEDPEVKFNW | Clone CH3B.17 |
| | YVDGVEVHNAKTKPREEQYNSTYRVVSVLTVLHQDWLNGKEYKC | |
| | KVSNKALPAPIEKTISKAKGQPRFELVATLPPSRDELTKNQVSLTCLV | |
| | KGFYPSDIAVEWESNGQPENNYKTTPPVLDSDGSFFLYSKLTVDKSR | |
| | WQQGNVFSCSVMHEALHNHYGFHDLSLSPGK | |
| 47 | APELLGGPSVFLFPPKPKDTLMISRTPEVTCVVVDVSHEDPEVEFIWY | Clone CH2A2.1 |
| | VDGVDVRYEWQLPREEQYNSTYRVVSVLTVLHQDWLNGKEYKCK | |
| | VSNKALPAPIEKTISKAKGQPREPQVYTLPPSRDELTKNQVSLTCLV | |
| | KGFYPSDIAVEWESNGQPENNYKTTPPVLDSDGSFFLYSKLTVDKSR | |
| | WQQGNVFSCSVMHEALHNHYTQKSLSLSPGK | |
| 48 | APELLGGPSVFLFPPKPKDTLMISRTPEVTCVVVDVSHEDPEVGFVVV | Clone CH2A2.2 |
| | YVDGVPVSWEWYWPREEQYNSTYRVVSVLTVLHQDWLNGKEYKC | |
| | KVSNKALPAPIEKTISKAKGQPREPQVYTLPPSRDELTKNQVSLTCL | |
| | VKGFYPSDIAVEWESNGQPENNYKTTPPVLDSDGSFFLYSKLTVDKS | |
| | RWQQGNVFSCSVMHEALHNHYTQKSLSLSPGK | |
| 49 | APELLGGPSVFLFPPKPKDTLMISRTPEVTCVVVDVSHEDPEVQFDW | Clone CH2A2.3 |
| | YVDGVMVRREWHRPREEQYNSTYRVVSVLTVLHQDWLNGKEYKC | |
| | KVSNKALPAPIEKTISKAKGQPREPQVYTLPPSRDELTKNQVSLTCL | |
| | VKGFYPSDIAVEWESNGQPENNYKTTPPVLDSDGSFFLYSKLTVDKS | |
| | RWQQGNVFSCSVMHEALHNHYTQKSLSLSPGK | |
| 50 | APELLGGPSVFLFPPKPKDTLMISRTPEVTCVVVDVSHEDPEVSFEW | Clone CH2A2.4 |
| | YVDGVPVRWEWQWPREEQYNSTYRVVSVLTVLHQDWLNGKEYK | |
| | CKVSNKALPAPIEKTISKAKGQPREPQVYTLPPSRDELTKNQVSLTCL | |
| | VKGFYPSDIAVEWESNGQPENNYKTTPPVLDSDGSFFLYSKLTVDKS | |
| | RWQQGNVFSCSVMHEALHNHYTQKSLSLSPGK | |
| 51 | APELLGGPSVFLFPPKPKDTLMISRTPEVTCVVVDVSHEDPEVAFTW | Clone CH2A2.5 |
| | YVDGVPVRWEWQNPREEQYNSTYRVVSVLTVLHQDWLNGKEYKC | |
| | KVSNKALPAPIEKTISKAKGQPREPQVYTLPPSRDELTKNQVSLTCL | |
| | VKGFYPSDIAVEWESNGQPENNYKTTPPVLDSDGSFFLYSKLTVDKS | |
| | RWQQGNVFSCSVMHEALHNHYTQKSLSLSPGK | |
| 52 | APELLGGPSVFLFPPKPKDTLMISRTPEVTCVVVDVSHEDPEVNFDW | Clone CH2A2.6 |
| | YVDGVLVRREWHRPREEQYNSTYRVVSVLTVLHQDWLNGKEYKC | |
| | KVSNKALPAPIEKTISKAKGQPREPQVYTLPPSRDELTKNQVSLTCL | |
| | VKGFYPSDIAVEWESNGQPENNYKTTPPVLDSDGSFFLYSKLTVDKS | |
| | RWQQGNVFSCSVMHEALHNHYTQKSLSLSPGK | |
| 53 | APELLGGPSVFLFPPKPKDTLMISRTPEVTCVVVDVSHEDPEVQFVVV | Clone CH2A2.7 |
| | YVDGVAVRWEWIRPREEQYNSTYRVVSVLTVLHQDWLNGKEYKC | |
| | KVSNKALPAPIEKTISKAKGQPREPQVYTLPPSRDELTKNQVSLTCL | |
| | VKGFYPSDIAVEWESNGQPENNYKTTPPVLDSDGSFFLYSKLTVDKS | |
| | RWQQGNVFSCSVMHEALHNHYTQKSLSLSPGK | |
| 54 | APELLGGPSVFLFPPKPKDTLMISRTPEVTCVVVDVSHEDPEVEFIWY | Clone CH2A2.8 |
| | VDGVEVAWEWFWPREEQYNSTYRVVSVLTVLHQDWLNGKEYKC | |
| | KVSNKALPAPIEKTISKAKGQPREPQVYTLPPSRDELTKNQVSLTCL | |
| | VKGFYPSDIAVEWESNGQPENNYKTTPPVLDSDGSFFLYSKLTVDKS | |
| | RWQQGNVFSCSVMHEALHNHYTQKSLSLSPGK | |
| 55 | APELLGGPSVFLFPPKPKDTLMISRTPEVTCVVVDVSHEDPEVGFAW | Clone CH2A2.9 |
| | YVDGVNVRVEWQYPREEQYNSTYRVVSVLTVLHQDWLNGKEYKC | |
| | KVSNKALPAPIEKTISKAKGQPREPQVYTLPPSRDELTKNQVSLTCL | |
| | VKGFYPSDIAVEWESNGQPENNYKTTPPVLDSDGSFFLYSKLTVDKS | |
| | RWQQGNVFSCSVMHEALHNHYTQKSLSLSPGK | |
| 56 | APELLGGPSVFLFPPKPKDTLMISRTPEVTCVVVDVSHEDPEVGFVVV | Clone CH2A2.10 |
| | YVDGVEVRREWVRPREEQYNSTYRVVSVLTVLHQDWLNGKEYKC | |
| | KVSNKALPAPIEKTISKAKGQPREPQVYTLPPSRDELTKNQVSLTCL | |
| | VKGFYPSDIAVEWESNGQPENNYKTTPPVLDSDGSFFLYSKLTVDKS | |
| | RWQQGNVFSCSVMHEALHNHYTQKSLSLSPGK | |
| 57 | APELLGGPSVFLFPPKPKDTLMISRTPEVTCVVVDVSHEDPEVSFDW | Clone CH2A2.11 |
| | YVDGVLVRREWQRPREEQYNSTYRVVSVLTVLHQDWLNGKEYKC | |
| | KVSNKALPAPIEKTISKAKGQPREPQVYTLPPSRDELTKNQVSLTCL | |
| | VKGFYPSDIAVEWESNGQPENNYKTTPPVLDSDGSFFLYSKLTVDKS | |
| | RWQQGNVFSCSVMHEALHNHYTQKSLSLSPGK | |
| 58 | APELLGGPSVFLFPPKPKDTLMISRTPEVTCVVVDVSHEDPEVEFTW | Clone CH2A2.12 |
| | YVDGVDVRYEWYYPREEQYNSTYRVVSVLTVLHQDWLNGKEYKC | |
| | KVSNKALPAPIEKTISKAKGQPREPQVYTLPPSRDELTKNQVSLTCL | |
| | VKGFYPSDIAVEWESNGQPENNYKTTPPVLDSDGSFFLYSKLTVDKS | |
| | RWQQGNVFSCSVMHEALHNHYTQKSLSLSPGK | |
| 59 | APELLGGPSVFLFPPKPKDTLMISRTPEVTCVVVDVSHEDPEVQFTW | Clone CH2A2.13 |
| | YVDGVDVRYEWVRPREEQYNSTYRVVSVLTVLHQDWLNGKEYKC | |
| | KVSNKALPAPIEKTISKAKGQPREPQVYTLPPSRDELTKNQVSLTCL | |
| | VKGFYPSDIAVEWESNGQPENNYKTTPPVLDSDGSFFLYSKLTVDKS | |
| | RWQQGNVFSCSVMHEALHNHYTQKSLSLSPGK | |
| 60 | APELLGGPSVFLFPPKPKDTLMISRTPEVTCVVVDVSHEDPEVQFYW | Clone CH2A2.14 |
| | YVDGVNVRREWHRPREEQYNSTYRVVSVLTVLHQDWLNGKEYKC | |
| | KVSNKALPAPIEKTISKAKGQPREPQVYTLPPSRDELTKNQVSLTCL | |
| | VKGFYPSDIAVEWESNGQPENNYKTTPPVLDSDGSFFLYSKLTVDKS | |
| | RWQQGNVFSCSVMHEALHNHYTQKSLSLSPGK | |
| 61 | APELLGGPSVFLFPPKPKDTLMISRTPEVTCVVVDVSHEDPEVYFDW | Clone CH2A2.15 |
| | YVDGVMVRREWHRPREEQYNSTYRVVSVLTVLHQDWLNGKEYKC | |
| | KVSNKALPAPIEKTISKAKGQPREPQVYTLPPSRDELTKNQVSLTCL | |
| | VKGFYPSDIAVEWESNGQPENNYKTTPPVLDSDGSFFLYSKLTVDKS | |
| | RWQQGNVFSCSVMHEALHNHYTQKSLSLSPGK | |
| 62 | APELLGGPSVFLFPPKPKDTLMISRTPEVTCVVVDVSHEDPEVVVFEW | Clone CH2A2.16 |
| | YVDGVFVGVAYDVPREEQYNSTYRVVSVLTVLHQDWLNGKEYKC | |
| | KVSNKALPAPIEKTISKAKGQPREPQVYTLPPSRDELTKNQVSLTCL | |
| | VKGFYPSDIAVEWESNGQPENNYKTTPPVLDSDGSFFLYSKLTVDKS | |
| | RWQQGNVFSCSVMHEALHNHYTQKSLSLSPGK | |
| 63 | APELLGGPSVFLFPPKPKDTLMISRTPEVTCVVVDPQTPPWEVKFNW | Clone CH2C.1 |
| | YVDGVEVHNAKTKPREEEYYTYYRVVSVLTVLHQDWLNGKEYKC | |
| | KVSNKALPAPIEKTISKAKGQPREPQVYTLPPSRDELTKNQVSLTCL | |
| | VKGFYPSDIAVEWESNGQPENNYKTTPPVLDSDGSFFLYSKLTVDKS | |
| | RWQQGNVFSCSVMHEALHNHYTQKSLSLSPGK | |
| 64 | APELLGGPSVFLFPPKPKDTLMISRTPEVTCVVVDPPSPPWEVKFNW | Clone CH2C.2 |
| | YVDGVEVHNAKTKPREEEYYSNYRVVSVLTVLHQDWLNGKEYKC | |
| | KVSNKALPAPIEKTISKAKGQPREPQVYTLPPSRDELTKNQVSLTCL | |
| | VKGFYPSDIAVEWESNGQPENNYKTTPPVLDSDGSFFLYSKLTVDKS | |
| | RWQQGNVFSCSVMHEALHNHYTQKSLSLSPGK | |
| 65 | APELLGGPSVFLFPPKPKDTLMISRTPEVTCVVVDPQTPPWEVKFNW | Clone CH2C.3 |
| | YVDGVEVHNAKTKPREEEYYSNYRVVSVLTVLHQDWLNGKEYKC | |
| | KVSNKALPAPIEKTISKAKGQPREPQVYTLPPSRDELTKNQVSLTCL | |
| | VKGFYPSDIAVEWESNGQPENNYKTTPPVLDSDGSFFLYSKLTVDKS | |
| | RWQQGNVFSCSVMHEALHNHYTQKSLSLSPGK | |
| 66 | APELLGGPSVFLFPPKPKDTLMISRTPEVTCVVVDFRGPPWEVKFNVV | Clone CH2C.4 |
| | YVDGVEVHNAKTKPREEEYYHDYRVVSVLTVLHQDWLNGKEYKC | |
| | KVSNKALPAPIEKTISKAKGQPREPQVYTLPPSRDELTKNQVSLTCL | |
| | VKGFYPSDIAVEWESNGQPENNYKTTPPVLDSDGSFFLYSKLTVDKS | |
| | RWQQGNVFSCSVMHEALHNHYTQKSLSLSPGK | |
| 67 | APELLGGPSVFLFPPKPKDTLMISRTPEVTCVVVDPQTVPWEVKFNW | Clone CH2C.5 |
| | YVDGVEVHNAKTKPREEEYYSNYRVVSVLTVLHQDWLNGKEYKC | |
| | KVSNKALPAPIEKTISKAKGQPREPQVYTLPPSRDELTKNQVSLTCL | |
| | VKGFYPSDIAVEWESNGQPENNYKTTPPVLDSDGSFFLYSKLTVDKS | |
| | RWQQGNVFSCSVMHEALHNHYTQKSLSLSPGK | |
| 68 | APELLGGPSVFLFPPKPKDTLMISRTPEVTCVVVDPKMPPWEVKFN | Clone CH2C.6 |
| | WYVDGVEVHNAKTKPREEEYYTYYRVVSVLTVLHQDWLNGKEYK | |
| | CKVSNKALPAPIEKTISKAKGQPREPQVYTLPPSRDELTKNQVSLTCL | |
| | VKGFYPSDIAVEWESNGQPENNYKTTPPVLDSDGSFFLYSKLTVDKS | |
| | RWQQGNVFSCSVMHEALHNHYTQKSLSLSPGK | |
| 69 | APELLGGPSVFLFPPKPKDTLMISRTPEVTCVVVDPPVPPWEVKFNW | Clone CH2C.7 |
| | YVDGVEVHNAKTKPREEEYYSNYRVVSVLTVLHQDWLNGKEYKC | |
| | KVSNKALPAPIEKTISKAKGQPREPQVYTLPPSRDELTKNQVSLTCL | |
| | VKGFYPSDIAVEWESNGQPENNYKTTPPVLDSDGSFFLYSKLTVDKS | |
| | RWQQGNVFSCSVMHEALHNHYTQKSLSLSPGK | |
| 70 | APELLGGPSVFLFPPKPKDTLMISRTPEVTCVVVDPAFPPWEVKFNW | Clone CH2C.8 |
| | YVDGVEVHNAKTKPREEEYYQNYRVVSVLTVLHQDWLNGKEYKC | |
| | KVSNKALPAPIEKTISKAKGQPREPQVYTLPPSRDELTKNQVSLTCL | |
| | VKGFYPSDIAVEWESNGQPENNYKTTPPVLDSDGSFFLYSKLTVDKS | |
| | RWQQGNVFSCSVMHEALHNHYTQKSLSLSPGK | |
| 71 | APELLGGPSVFLFPPKPKDTLMISRTPEVTCVVVDAIWPPWEVKFNW | Clone CH2C.9 |
| | YVDGVEVHNAKTKPREEEYYSNYRVVSVLTVLHQDWLNGKEYKC | |
| | KVSNKALPAPIEKTISKAKGQPREPQVYTLPPSRDELTKNQVSLTCL | |
| | VKGFYPSDIAVEWESNGQPENNYKTTPPVLDSDGSFFLYSKLTVDKS | |
| | RWQQGNVFSCSVMHEALHNHYTQKSLSLSPGK | |
| 72 | APELLGGPSVFLFPPKPKDTLMISRTPEVTCVVVDPPVAPWEVKFNW | Clone CH2C.10 |
| | YVDGVEVHNAKTKPREEEYYSSYRVVSVLTVLHQDWLNGKEYKC | |
| | KVSNKALPAPIEKTISKAKGQPREPQVYTLPPSRDELTKNQVSLTCL | |
| | VKGFYPSDIAVEWESNGQPENNYKTTPPVLDSDGSFFLYSKLTVDKS | |
| | RWQQGNVFSCSVMHEALHNHYTQKSLSLSPGK | |
| 73 | APELLGGPSVFLFPPKPKDTLMISRTPEVTCVVVDPQMPPQEVKFNW | Clone CH2C.11 |
| | YVDGVEVHNAKTKPREEEYYSNYRVVSVLTVLHQDWLNGKEYKC | |
| | KVSNKALPAPIEKTISKAKGQPREPQVYTLPPSRDELTKNQVSLTCL | |
| | VKGFYPSDIAVEWESNGQPENNYKTTPPVLDSDGSFFLYSKLTVDKS | |
| | RWQQGNVFSCSVMHEALHNHYTQKSLSLSPGK | |
| 74 | APELLGGPSVFLFPPKPKDTLMISRTPEVTCVVVDPQTAPWEVKFNW | Clone CH2C.12 |
| | YVDGVEVHNAKTKPREEEYYTYYRVVSVLTVLHQDWLNGKEYKC | |
| | KVSNKALPAPIEKTISKAKGQPREPQVYTLPPSRDELTKNQVSLTCL | |
| | VKGFYPSDIAVEWESNGQPENNYKTTPPVLDSDGSFFLYSKLTVDKS | |
| | RWQQGNVFSCSVMHEALHNHYTQKSLSLSPGK | |
| 75 | APELLGGPSVFLFPPKPKDTLMISRTPEVTCVVVDPQTPPQEVKFNW | Clone CH2 C.13 |
| | YVDGVEVHNAKTKPREEEYYSNYRVVSVLTVLHQDWLNGKEYKC | |
| | KVSNKALPAPIEKTISKAKGQPREPQVYTLPPSRDELTKNQVSLTCL | |
| | VKGFYPSDIAVEWESNGQPENNYKTTPPVLDSDGSFFLYSKLTVDKS | |
| | RWQQGNVFSCSVMHEALHNHYTQKSLSLSPGK | |
| 76 | APELLGGPSVFLFPPKPKDTLMISRTPEVTCVVVDPQTPPWEVKFNW | Clone CH2C.14 |
| | YVDGVEVHNAKTKPREEEYYTYYRVVSVLTVLHQDWLNGKEYKC | |
| | KVSNKALPAPIEKTISKAKGQPREPQVYTLPPSRDELTKNQVSLTCL | |
| | VKGFYPSDIAVEWESNGQPENNYKTTPPVLDSDGSFFLYSKLTVDKS | |
| | RWQQGNVFSCSVMHEALHNHYTQKSLSLSPGK | |
| 77 | APELLGGPSVFLFPPKPKDTLMISRTPEVTCVVVDPRVPPWEVKFNVV | CloneCH2C.15 |
| | YVDGVEVHNAKTKPREEEYYQNYRVVSVLTVLHQDWLNGKEYKC | |
| | KVSNKALPAPIEKTISKAKGQPREPQVYTLPPSRDELTKNQVSLTCL | |
| | VKGFYPSDIAVEWESNGQPENNYKTTPPVLDSDGSFFLYSKLTVDKS | |
| | RWQQGNVFSCSVMHEALHNHYTQKSLSLSPGK | |
| 78 | APELLGGPSVFLFPPKPKDTLMISRTPEVTCVVVDPSVPPWEVKFNW | Clone CH2C.16 |
| | YVDGVEVHNAKTKPREEEYYSNYRVVSVLTVLHQDWLNGKEYKC | |
| | KVSNKALPAPIEKTISKAKGQPREPQVYTLPPSRDELTKNQVSLTCL | |
| | VKGFYPSDIAVEWESNGQPENNYKTTPPVLDSDGSFFLYSKLTVDKS | |
| | RWQQGNVFSCSVMHEALHNHYTQKSLSLSPGK | |
| 79 | APELLGGPSVFLFPPKPKDTLMISRTPEVTCVVVDMLWPVPEVKFN | Clone CH2C.17 |
| | WYVDGVEVHNAKTKPREEVYHRPYRVVSVLTVLHQDWLNGKEYK | |
| | CKVSNKALPAPIEKTISKAKGQPREPQVYTLPPSRDELTKNQVSLTCL | |
| | VKGFYPSDIAVEWESNGQPENNYKTTPPVLDSDGSFFLYSKLTVDKS | |
| | RWQQGNVFSCSVMHEALHNHYTQKSLSLSPGK | |
| 80 | APELLGGPSVFLFPPKPKDTLMISRTPEVTCVVVDMLWPVPEVKFN | Clone CH2C.18 |
| | WYVDGVEVHNAKTKPREETYHNPYRVVSVLTVLHQDWLNGKEYK | |
| | CKVSNKALPAPIEKTISKAKGQPREPQVYTLPPSRDELTKNQVSLTCL | |
| | VKGFYPSDIAVEWESNGQPENNYKTTPPVLDSDGSFFLYSKLTVDKS | |
| | RWQQGNVFSCSVMHEALHNHYTQKSLSLSPGK | |
| 81 | APELLGGPSVFLFPPKPKDTLMISRTPEVTCVVVDMEWPVIEVKFN | Clone CH2C.19 |
| | WYVDGVEVHNAKTKPREETYHNPYRVVSVLTVLHQDWLNGKEYK | |
| | CKVSNKALPAPIEKTISKAKGQPREPQVYTLPPSRDELTKNQVSLTCL | |
| | VKGFYPSDIAVEWESNGQPENNYKTTPPVLDSDGSFFLYSKLTVDKS | |
| | RWQQGNVFSCSVMHEALHNHYTQKSLSLSPGK | |
| 82 | APELLGGPSVFLFPPKPKDTLMISRTPEVTCVVVDMLWPVPEVKFN | Clone CH2C.20 |
| | WYVDGVEVHNAKTKPREETYHHPYRVVSVLTVLHQDWLNGKEYK | |
| | CKVSNKALPAPIEKTISKAKGQPREPQVYTLPPSRDELTKNQVSLTCL | |
| | VKGFYPSDIAVEWESNGQPENNYKTTPPVLDSDGSFFLYSKLTVDKS | |
| | RWQQGNVFSCSVMHEALHNHYTQKSLSLSPGK | |
| 83 | APELLGGPSVFLFPPKPKDTLMISRTPEVTCVVVDDDLTFQEVKFNW | Clone CH2C.21 |
| | YVDGVEVHNAKTKPREEVYVTPYRVVSVLTVLHQDWLNGKEYKC | |
| | KVSNKALPAPIEKTISKAKGQPREPQVYTLPPSRDELTKNQVSLTCL | |
| | VKGFYPSDIAVEWESNGQPENNYKTTPPVLDSDGSFFLYSKLTVDKS | |
| | RWQQGNVFSCSVMHEALHNHYTQKSLSLSPGK | |
| 84 | APELLGGPSVFLFPPKPKDTLMISRTPEVTCVVVDDDLTFQEVKFNW | Clone CH2C.22 |
| | YVDGVEVHNAKTKPREELYVTPYRVVSVLTVLHQDWLNGKEYKC | |
| | KVSNKALPAPIEKTISKAKGQPREPQVYTLPPSRDELTKNQVSLTCL | |
| | VKGFYPSDIAVEWESNGQPENNYKTTPPVLDSDGSFFLYSKLTVDKS | |
| | RWQQGNVFSCSVMHEALHNHYTQKSLSLSPGK | |
| 85 | APELLGGPSVFLFPPKPKDTLMISRTPEVTCVVVDAYGDPEEVKFNW | Clone CH2C.23 |
| | YVDGVEVHNAKTKPREEWYDVPYRVVSVLTVLHQDWLNGKEYKC | |
| | KVSNKALPAPIEKTISKAKGQPREPQVYTLPPSRDELTKNQVSLTCL | |
| | VKGFYPSDIAVEWESNGQPENNYKTTPPVLDSDGSFFLYSKLTVDKS | |
| | RWQQGNVFSCSVMHEALHNHYTQKSLSLSPGK | |
| 86 | APELLGGPSVFLFPPKPKDTLMISRTPEVTCVVVDVSVPPRMVKFNW | Clone CH2D.1 |
| | YVDGVEVHNAKTKSLTSQHNSTVRVVSVLTVLHQDWLNGKEYKC | |
| | KVSNKALPAPIEKTISKAKGQPREPQVYTLPPSRDELTKNQVSLTCL | |
| | VKGFYPSDIAVEWESNGQPENNYKTTPPVLDSDGSFFLYSKLTVDKS | |
| | RWQQGNVFSCSVMHEALHNHYTQKSLSLSPGK | |
| 87 | APELLGGPSVFLFPPKPKDTLMISRTPEVTCVVVDVSVPPWMVKFN | Clone CH2D.2 |
| | WYVDGVEVHNAKTKSLTSQHNSTVRVVSVLTVLHQDWLNGKEYK | |
| | CKVSNKALPAPIEKTISKAKGQPREPQVYTLPPSRDELTKNQVSLTCL | |
| | VKGFYPSDIAVEWESNGQPENNYKTTPPVLDSDGSFFLYSKLTVDKS | |
| | RWQQGNVFSCSVMHEALHNHYTQKSLSLSPGK | |
| 88 | APELLGGPSVFLFPPKPKDTLMISRTPEVTCVVVDVSDMWEYVKFN | Clone CH2D.3 |
| | WYVDGVEVHNAKTKPWVKQLNSTWRVVSVLTVLHQDWLNGKEY | |
| | KCKVSNKALPAPIEKTISKAKGQPREPQVYTLPPSRDELTKNQVSLT | |
| | CLVKGFYPSDIAVEWESNGQPENNYKTTPPVLDSDGSFFLYSKLTVD | |
| | KSRWQQGNVFSCSVMHEALHNHYTQKSLSLSPGK | |
| 89 | APELLGGPSVFLFPPKPKDTLMISRTPEVTCVVVDVSDDWTWVKFN | Clone CH2D.4 |
| | WYVDGVEVHNAKTKPWIAQPNSTWRVVSVLTVLHQDWLNGKEYK | |
| | CKVSNKALPAPIEKTISKAKGQPREPQVYTLPPSRDELTKNQVSLTCL | |
| | VKGFYPSDIAVEWESNGQPENNYKTTPPVLDSDGSFFLYSKLTVDKS | |
| | RWQQGNVFSCSVMHEALHNHYTQKSLSLSPGK | |
| 90 | APELLGGPSVFLFPPKPKDTLMISRTPEVTCVVVDVSDDWEWVKFN | Clone CH2D.5 |
| | WYVDGVEVHNAKTKPWKLQLNSTWRVVSVLTVLHQDWLNGKEY | |
| | KCKVSNKALPAPIEKTISKAKGQPREPQVYTLPPSRDELTKNQVSLT | |
| | CLVKGFYPSDIAVEWESNGQPENNYKTTPPVLDSDGSFFLYSKLTVD | |
| | KSRWQQGNVFSCSVMHEALHNHYTQKSLSLSPGK | |
| 91 | APELLGGPSVFLFPPKPKDTLMISRTPEVTCVVVDVSHEDPWVWFY | Clone CH2E3.1 |
| | WYVDGVEVHNAKTKPREEQYNSTYRVVSVLTVLHQDWLNGKEYK | |
| | CSVVNIALWWSIEKTISKAKGQPREPQVYTLPPSRDELTKNQVSLTC | |
| | LVKGFYPSDIAVEWESNGQPENNYKTTPPVLDSDGSFFLYSKLTVDK | |
| | SRWQQGNVFSCSVMHEALHNHYTQKSLSLSPGK | |
| 92 | APELLGGPSVFLFPPKPKDTLMISRTPEVTCVVVDVSHEDPVVGFRW | Clone CH2E3.2 |
| | YVDGVEVHNAKTKPREEQYNSTYRVVSVLTVLHQDWLNGKEYKC | |
| | RVSNSALTWKIEKTISKAKGQPREPQVYTLPPSRDELTKNQVSLTCL | |
| | VKGFYPSDIAVEWESNGQPENNYKTTPPVLDSDGSFFLYSKLTVDKS | |
| | RWQQGNVFSCSVMHEALHNHYTQKSLSLSPGK | |
| 93 | APELLGGPSVFLFPPKPKDTLMISRTPEVTCVVVDVSHEDPVVGFRW | Clone CH2E3.3 |
| | YVDGVEVHNAKTKPREEQYNSTYRVVSVLTVLHQDWLNGKEYKC | |
| | RVSNSALSWRIEKTISKAKGQPREPQVYTLPPSRDELTKNQVSLTCL | |
| | VKGFYPSDIAVEWESNGQPENNYKTTPPVLDSDGSFFLYSKLTVDKS | |
| | RWQQGNVFSCSVMHEALHNHYTQKSLSLSPGK | |
| 94 | APELLGGPSVFLFPPKPKDTLMISRTPEVTCVVVDVSHEDPIVGFRW | Clone CH2E3.4 |
| | YVDGVEVHNAKTKPREEQYNSTYRVVSVLTVLHQDWLNGKEYKC | |
| | RVSNSALRWRIEKTISKAKGQPREPQVYTLPPSRDELTKNQVSLTCL | |
| | VKGFYPSDIAVEWESNGQPENNYKTTPPVLDSDGSFFLYSKLTVDKS | |
| | RWQQGNVFSCSVMHEALHNHYTQKSLSLSPGK | |
| 95 | APELLGGPSVFLFPPKPKDTLMISRTPEVTCVVVDVSHEDPAVGFEW | Clone CH2E3.5 |
| | YVDGVEVHNAKTKPREEQYNSTYRVVSVLTVLHQDWLNGKEYKC | |
| | QVFNWALDWVIEKTISKAKGQPREPQVYTLPPSRDELTKNQVSLTC | |
| | LVKGFYPSDIAVEWESNGQPENNYKTTPPVLDSDGSFFLYSKLTVDK | |
| | SRWQQGNVFSCSVMHEALHNHYTQKSLSLSPGK | |
| 96 | NSVIIVDKNGRLVYLVENPGGYVAYSKAATVTGKLVHANFGTKKD | Human TfR apical domain |
| | FEDLYTPVNGSIVIVRAGKITFAEKVANAESLNAIGVLIYMDQTKFPI | |
| | VNAELSFFGHAHLGTGDPYTPGFPSFNHTQFPPSRSSGLPNIPVQTISR | |
| | AAAEKLFGNMEGDCPSDWKTDSTCRMVTSESKNVKLTVS | |
| 97 | NSVIIVDKNGGLVYLVENPGGYVAYSKAATVTGKLVHANFGTKKD | Cynomolgus TfR apical |
| | FEDLDSPVNGSIVIVRAGKITFAEKVANAESLNAIGVLIYMDQTKFPI | domain |
| | VKADLSFFGHAHLGTGDPYTPGFPSFNHTQFPPSQSSGLPNIPVQTIS | |
| | RAAAEKLFGNMEGDCPSDWKTDSTCKMVTSENKSVKLTVS | |
| 98 | SSGLPNIPVQTISRAAAEKLFGNMEGDCPSDWKTDSTCRMVTSESKN | Loop-truncated human |
| | VKLTVSNDSAQNSVIIVDKNGRLVYLVENPGGYVAYSKAATVTGKL | TfR apical domain |
| | VHANFGTKKDFEDLYTPVNGSIVIVRAGKITFAEKVANAESLNAIGV | displayed on phage |
| | LIYMDQTKFPIVNAELSGP | |
| 99 | SSGLPNIPVQTISRAAAEKLFGNMEGDCPSDWKTDSTCKMVTSENK | Loop-truncated |
| | SVKLTVSNDSAQNSVIIVDKNGGLVYLVENPGGYVAYSKAATVTGK | cynomolgus TfR apical |
| | LVHANFGTKKDFEDLDSPVNGSIVIVRAGKITFAEKVANAESLNAIG | domain displayed on |
| | VLIYMDQTKFPIVKADLSGP | phage |
| 100 | MMDQARSAFSNLFGGEPLSYTRFSLARQVDGDNSHVEMKLAVDEE | Human transferrin receptor |
| | ENADNNTKANVTKPKRCSGSICYGTIAVIVFFLIGFMIGYLGYCKGV | protein 1 (TFR1) |
| | EPKIECERLAGTESPVREEPGEDFPAARRLYWDDLKRKLSEKLDST | |
| | DFTGTIKLLNENSYVPREAGSQKDENLALYVENQFREFKLSKVWRD | |
| | QHFVKIQVKDSAQNSVIIVDKNGRLVYLVENPGGYVAYSKAATVTG | |
| | KLVHANFGTKKDFEDLYTPVNGSIVIVRAGKITFAEKVANAESLNAI | |
| | GVLIYMDQTKFPIVNAELSFFGHAHLGTGDPYTPGFPSFNHTQFPPSR | |
| | SSGLPNIPVQTISRAAAEKLFGNMEGDCPSDWKTDSTCRMVTSESKN | |
| | VKLTVSNVLKEIKILNIFGVIKGFVEPDHYVVVGAQRDAWGPGAAK | |
| | SGVGTALLLKLAQMFSDMVLKDGFQPSRSIIFASWSAGDFGSVGAT | |
| | EWLEGYLSSLHLKAFTYINLDKAVLGTSNFKVSASPLLYTLIEKTMQ | |
| | NVKHPVTGQFLYQDSNWASKVEKLTLDNAAFPFLAYSGIPAVSFCF | |
| | CEDTDYPYLGTTMDTYKELIERIPELNKVARAAAEVAGQFVIKLTH | |
| | DVELNLDYERYNSQLLSFVRDLNQYRADIKEMGLSLQWLYSARGD | |
| | FFRATSRLTTDFGNAEKTDRFVMKKLNDRVMRVEYHFLSPYVSPKE | |
| | SPFRHVFWGSGSHTLPALLENLKLRKQNNGAFNETLFRNQLALATW | |
| | TIQGAANALSGDVWDIDNEF | |
| 101 | APELLGGPSVFLFPPKPKDTLMISRTPEVTCVVVDVSHEDPEVKFNW | Clone CH3C.35.19 |
| | YVDGVEVHNAKTKPREEQYNSTYRVVSVLTVLHQDWLNGKEYKC | |
| | KVSNKALPAPIEKTISKAKGQPREPQVYTLPPSRDELTKNQVSLTCL | |
| | VKGFYPSDIAVWWESYGTEWSSYKTTPPVLDSDGSFFLYSKLTVTK | |
| | SEWQQGFVFSCSVMHEALHNHYTQKSLSLSPGK | |
| 102 | APELLGGPSVFLFPPKPKDTLMISRTPEVTCVVVDVSHEDPEVKFNW | Clone CH3C.35.20 |
| | YVDGVEVHNAKTKPREEQYNSTYRVVSVLTVLHQDWLNGKEYKC | |
| | KVSNKALPAPIEKTISKAKGQPREPQVYTLPPSRDELTKNQVSLTCL | |
| | VKGFYPSDIAVEWESYGTEWSSYKTTPPVLDSDGSFFLYSKLTVTKE | |
| | EWQQGFVFSCSVMHEALHNHYTQKSLSLSPGK | |
| 103 | APELLGGPSVFLFPPKPKDTLMISRTPEVTCVVVDVSHEDPEVKFNW | Clone CH3C.35.21 |
| | YVDGVEVHNAKTKPREEQYNSTYRVVSVLTVLHQDWLNGKEYKC | |
| | KVSNKALPAPIEKTISKAKGQPREPQVYTLPPSRDELTKNQVSLTCL | |
| | VKGFYPSDIAWWESYGTEWSSYKTTPPVLDSDGSFFLYSKLTVTK | |
| | EEWQQGFVFSCSVMHEALHNHYTQKSLSLSPGK | |
| 104 | APELLGGPSVFLFPPKPKDTLMISRTPEVTCVVVDVSHEDPEVKFNW | Clone CH3C.35.22 |
| | YVDGVEVHNAKTKPREEQYNSTYRVVSVLTVLHQDWLNGKEYKC | |
| | KVSNKALPAPIEKTISKAKGQPREPQVYTLPPSRDELTKNQVSLTCL | |
| | VKGFYPSDIAVWWESYGTEWSNYKTTPPVLDSDGSFFLYSKLTVTK | |
| | SEWQQGFVFSCSVMHEALHNHYTQKSLSLSPGK | |
| 105 | APELLGGPSVFLFPPKPKDTLMISRTPEVTCVVVDVSHEDPEVKFNW | Clone CH3C.35.23 |
| | YVDGVEVHNAKTKPREEQYNSTYRVVSVLTVLHQDWLNGKEYKC | |
| | KVSNKALPAPIEKTISKAKGQPREPQVYTLPPSRDELTKNQVSLTCL | |
| | VKGFYPSDIAVEWESYGTEWSNYKTTPPVLDSDGSFFLYSKLTVTKE | |
| | EWQQGFVFSCSVMHEALHNHYTQKSLSLSPGK | |
| 106 | APELLGGPSVFLFPPKPKDTLMISRTPEVTCVVVDVSHEDPEVKFNW | Clone CH3C.35.24 |
| | YVDGVEVHNAKTKPREEQYNSTYRVVSVLTVLHQDWLNGKEYKC | |
| | KVSNKALPAPIEKTISKAKGQPREPQVYTLPPSRDELTKNQVSLTCL | |
| | VKGFYPSDIAVWWESYGTEWSNYKTTPPVLDSDGSFFLYSKLTVTK | |
| | EEWQQGFVFSCSVMHEALHNHYTQKSLSLSPGK | |
| 107 | APELLGGPSVFLFPPKPKDTLMISRTPEVTCVVVDVSHEDPEVKFNW | CH3C.18 variant |
| | YVDGVEVHNAKTKPREEQYNSTYRVVSVLTVLHQDWLNGKEYKC | |
| | KVSNKALPAPIEKTISKAKGQPREPQVYTLPPSRDELTKNQVSLTCL | |
| | VKGFYPSDIAVWWESLGHVWAVYKTTPPVLDSDGSFFLYSKLTVPK | |
| | STWQQGWVFSCSVMHEALHNHYTQKSLSLSPGK | |
| 108 | APELLGGPSVFLFPPKPKDTLMISRTPEVTCVVVDVSHEDPEVKFNW | CH3C.18 variant |
| | YVDGVEVHNAKTKPREEQYNSTYRVVSVLTVLHQDWLNGKEYKC | |
| | KVSNKALPAPIEKTISKAKGQPREPQVYTLPPSRDELTKNQVSLTCL | |
| | VKGFYPSDIAVLWESLGHVVVAVYKTTPPVLDSDGSFFLYSKLTVPK | |
| | STWQQGWVFSCSVMHEALHNHYTQKSLSLSPGK | |
| 109 | APELLGGPSVFLFPPKPKDTLMISRTPEVTCVVVDVSHEDPEVKFNW | CH3C.18 variant |
| | YVDGVEVHNAKTKPREEQYNSTYRVVSVLTVLHQDWLNGKEYKC | |
| | KVSNKALPAPIEKTISKAKGQPREPQVYTLPPSRDELTKNQVSLTCL | |
| | VKGFYPSDIAVYWESLGHVVVAVYKTTPPVLDSDGSFFLYSKLTVPK | |
| | STWQQGWVFSCSVMHEALHNHYTQKSLSLSPGK | |
| 110 | APELLGGPSVFLFPPKPKDTLMISRTPEVTCVVVDVSHEDPEVKFNW | CH3C.18 variant |
| | YVDGVEVHNAKTKPREEQYNSTYRVVSVLTVLHQDWLNGKEYKC | |
| | KVSNKALPAPIEKTISKAKGQPREPQVYTLPPSRDELTKNQVSLTCL | |
| | VKGFYPSDIAVEWESLGHVVVAVYQTTPPVLDSDGSFFLYSKLTVPK | |
| | STWQQGWVFSCSVMHEALHNHYTQKSLSLSPGK | |
| 111 | APELLGGPSVFLFPPKPKDTLMISRTPEVTCVVVDVSHEDPEVKFNW | CH3C.18 variant |
| | YVDGVEVHNAKTKPREEQYNSTYRVVSVLTVLHQDWLNGKEYKC | |
| | KVSNKALPAPIEKTISKAKGQPREPQVYTLPPSRDELTKNQVSLTCL | |
| | VKGFYPSDIAVEWESLGHVVVAVYFTTPPVLDSDGSFFLYSKLTVPKS | |
| | TWQQGWVFSCSVMHEALHNHYTQKSLSLSPGK | |
| 112 | APELLGGPSVFLFPPKPKDTLMISRTPEVTCVVVDVSHEDPEVKFNW | CH3C.18 variant |
| | YVDGVEVHNAKTKPREEQYNSTYRVVSVLTVLHQDWLNGKEYKC | |
| | KVSNKALPAPIEKTISKAKGQPREPQVYTLPPSRDELTKNQVSLTCL | |
| | VKGFYPSDIAVEWESLGHVVVAVYHTTPPVLDSDGSFFLYSKLTVPK | |
| | STWQQGWVFSCSVMHEALHNHYTQKSLSLSPGK | |
| 113 | APELLGGPSVFLFPPKPKDTLMISRTPEVTCVVVDVSHEDPEVKFNW | Clone CH3C.35.21.1 |
| | YVDGVEVHNAKTKPREEQYNSTYRVVSVLTVLHQDWLNGKEYKC | |
| | KVSNKALPAPIEKTISKAKGQPREPQVYTLPPSRDELTKNQVSLTCL | |
| | VKGFYPSDIAVLWESYGTEWSSYKTTPPVLDSDGSFFLYSKLTVTKS | |
| | EWQQGFVFSCSVMHEALHNHYTQKSLSLSPGK | |
| 114 | APELLGGPSVFLFPPKPKDTLMISRTPEVTCVVVDVSHEDPEVKFNW | Clone CH3C.35.21.2 |
| | YVDGVEVHNAKTKPREEQYNSTYRVVSVLTVLHQDWLNGKEYKC | |
| | KVSNKALPAPIEKTISKAKGQPREPQVYTLPPSRDELTKNQVSLTCL | |
| | VKGFYPSDIAVLWESYGTEWSSYRTTPPVLDSDGSFFLYSKLTVTKS | |
| | EWQQGFVFSCSVMHEALHNHYTQKSLSLSPGK | |
| 115 | APELLGGPSVFLFPPKPKDTLMISRTPEVTCVVVDVSHEDPEVKFNW | Clone CH3C.35.21.3 |
| | YVDGVEVHNAKTKPREEQYNSTYRVVSVLTVLHQDWLNGKEYKC | |
| | KVSNKALPAPIEKTISKAKGQPREPQVYTLPPSRDELTKNQVSLTCL | |
| | VKGFYPSDIAVLWESYGTEWSSYRTTPPVLDSDGSFFLYSKLTVTRE | |
| | EWQQGFVFSCSVMHEALHNHYTQKSLSLSPGK | |
| 116 | APELLGGPSVFLFPPKPKDTLMISRTPEVTCVVVDVSHEDPEVKFNW | Clone CH3C.35.21.4 |
| | YVDGVEVHNAKTKPREEQYNSTYRVVSVLTVLHQDWLNGKEYKC | |
| | KVSNKALPAPIEKTISKAKGQPREPQVYTLPPSRDELTKNQVSLTCL | |
| | VKGFYPSDIAVLWESYGTEWSSYRTTPPVLDSDGSFFLYSKLTVTGE | |
| | EWQQGFVFSCSVMHEALHNHYTQKSLSLSPGK | |
| 117 | APELLGGPSVFLFPPKPKDTLMISRTPEVTCVVVDVSHEDPEVKFNW | Clone CH3C.35.21.5 |
| | YVDGVEVHNAKTKPREEQYNSTYRVVSVLTVLHQDWLNGKEYKC | |
| | KVSNKALPAPIEKTISKAKGQPREPQVYTLPPSRDELTKNQVSLTCL | |
| | VKGFYPSDIAVLWESYGTEWSSYRTTPPVLDSDGSFFLYSKLTVTRE | |
| | EWQQGFVFSCWVMHEALHNHYTQKSLSLSPGK | |
| 118 | APELLGGPSVFLFPPKPKDTLMISRTPEVTCVVVDVSHEDPEVKFNW | Clone CH3C.35.21.6 |
| | YVDGVEVHNAKTKPREEQYNSTYRVVSVLTVLHQDWLNGKEYKC | |
| | KVSNKALPAPIEKTISKAKGQPREPQVYTLPPSRDELTKNQVSLTCL | |
| | VKGFYPSDIAVLWESYGTEWSSYRTTPPVLDSDGSFFLYSKLTVTKE | |
| | EWQQGFVFSCWVMHEALHNHYTQKSLSLSPGK | |
| 119 | APELLGGPSVFLFPPKPKDTLMISRTPEVTCVVVDVSHEDPEVKFNW | Clone CH3C.35.21.7 |
| | YVDGVEVHNAKTKPREEQYNSTYRVVSVLTVLHQDWLNGKEYKC | |
| | KVSNKALPAPIEKTISKAKGQPREPQVYTLPPSRDELTKNQVSLTCL | |
| | VKGFYPSDIAVLWESYGTEWSSYRTTPPVLDSDGSFFLYSKLTVTRE | |
| | EWQQGFVFTCWVMHEALHNHYTQKSLSLSPGK | |
| 120 | APELLGGPSVFLFPPKPKDTLMISRTPEVTCVVVDVSHEDPEVKFNW | Clone CH3C.35.21.8 |
| | YVDGVEVHNAKTKPREEQYNSTYRVVSVLTVLHQDWLNGKEYKC | |
| | KVSNKALPAPIEKTISKAKGQPREPQVYTLPPSRDELTKNQVSLTCL | |
| | VKGFYPSDIAVLWESYGTEWSSYRTTPPVLDSDGSFFLYSKLTVTRE | |
| | EWQQGFVFTCGVMHEALHNHYTQKSLSLSPGK | |
| 121 | APELLGGPSVFLFPPKPKDTLMISRTPEVTCVVVDVSHEDPEVKFNW | CloneCH3C.35.21.9 |
| | YVDGVEVHNAKTKPREEQYNSTYRVVSVLTVLHQDWLNGKEYKC | |
| | KVSNKALPAPIEKTISKAKGQPREPQVYTLPPSRDELTKNQVSLTCL | |
| | VKGFYPSDIAVLWESYGTEWSSYRTTPPVLDSDGSFFLYSKLTVTRE | |
| | EWQQGFVFECWVMHEALHNHYTQKSLSLSPGK | |
| 122 | APELLGGPSVFLFPPKPKDTLMISRTPEVTCVVVDVSHEDPEVKFNW | Clone CH3C.35.21.10 |
| | YVDGVEVHNAKTKPREEQYNSTYRVVSVLTVLHQDWLNGKEYKC | |
| | KVSNKALPAPIEKTISKAKGQPREPQVYTLPPSRDELTKNQVSLTCL | |
| | VKGFYPSDIAVLWESYGTEWSSYRTTPPVLDSDGSFFLYSKLTVTRE | |
| | EWQQGFVFKCWVMHEALHNHYTQKSLSLSPGK | |
| 123 | APELLGGPSVFLFPPKPKDTLMISRTPEVTCVVVDVSHEDPEVKFNW | Clone CH3C.35.21.11 |
| | YVDGVEVHNAKTKPREEQYNSTYRVVSVLTVLHQDWLNGKEYKC | |
| | KVSNKALPAPIEKTISKAKGQPREPQVYTLPPSRDELTKNQVSLTCL | |
| | VKGFYPSDIAVLWESYGTEWSSYRTTPPVLDSDGSFFLYSKLTVTPE | |
| | EWQQGFVFKCWVMHEALHNHYTQKSLSLSPGK | |
| 124 | APELLGGPSVFLFPPKPKDTLMISRTPEVTCVVVDVSHEDPEVKFNW | Clone CH3C.35.21.12 |
| | YVDGVEVHNAKTKPREEQYNSTYRVVSVLTVLHQDWLNGKEYKC | |
| | KVSNKALPAPIEKTISKAKGQPREPQVYTLPPSRDELTKNQVSLTCL | |
| | VKGFYPSDIAVVVWESYGTEWSSYRTTPPVLDSDGSFFLYSKLTVTR | |
| | EEWQQGFVFSCSVMHEALHNHYTQKSLSLSPGK | |
| 125 | APELLGGPSVFLFPPKPKDTLMISRTPEVTCVVVDVSHEDPEVKFNW | Clone CH3C.35.21.13 |
| | YVDGVEVHNAKTKPREEQYNSTYRVVSVLTVLHQDWLNGKEYKC | |
| | KVSNKALPAPIEKTISKAKGQPREPQVYTLPPSRDELTKNQVSLTCL | |
| | VKGFYPSDIAVVVWESYGTEWSSYRTTPPVLDSDGSFFLYSKLTVTG | |
| | EEWQQGFVFSCSVMHEALHNHYTQKSLSLSPGK | |
| 126 | APELLGGPSVFLFPPKPKDTLMISRTPEVTCVVVDVSHEDPEVKFNW | Clone CH3C.35.21.14 |
| | YVDGVEVHNAKTKPREEQYNSTYRVVSVLTVLHQDWLNGKEYKC | |
| | KVSNKALPAPIEKTISKAKGQPREPQVYTLPPSRDELTKNQVSLTCL | |
| | VKGFYPSDIAVVVWESYGTEWSSYRTTPPVLDSDGSFFLYSKLTVTR | |
| | EEWQQGFVFTCWVMHEALHNHYTQKSLSLSPGK | |
| 127 | APELLGGPSVFLFPPKPKDTLMISRTPEVTCVVVDVSHEDPEVKFNW | Clone CH3C.35.21.15 |
| | YVDGVEVHNAKTKPREEQYNSTYRVVSVLTVLHQDWLNGKEYKC | |
| | KVSNKALPAPIEKTISKAKGQPREPQVYTLPPSRDELTKNQVSLTCL | |
| | VKGFYPSDIAVVVWESYGTEWSSYRTTPPVLDSDGSFFLYSKLTVTG | |
| | EEWQQGFVFTCWVMHEALHNHYTQKSLSLSPGK | |
| 128 | APELLGGPSVFLFPPKPKDTLMISRTPEVTCVVVDVSHEDPEVKFNW | Clone CH3C.35.21.16 |
| | YVDGVEVHNAKTKPREEQYNSTYRVVSVLTVLHQDWLNGKEYKC | |
| | KVSNKALPAPIEKTISKAKGQPREPQVYTLPPSRDELTKNQVSLTCL | |
| | VKGFYPSDIAVVVWESYGTEWSSYRTTPPVLDSDGSFFLYSKLTVTR | |
| | EEWQQGFVFTCGVMHEALHNHYTQKSLSLSPGK | |
| 129 | APELLGGPSVFLFPPKPKDTLMISRTPEVTCVVVDVSHEDPEVKFNW | Clone CH3C.35.21.17 |
| | YVDGVEVHNAKTKPREEQYNSTYRVVSVLTVLHQDWLNGKEYKC | |
| | KVSNKALPAPIEKTISKAKGQPREPQVYTLPPSRDELTKNQVSLTCL | |
| | VKGFYPSDIAVLWESYGTEWSSYKTTPPVLDSDGSFFLYSKLTVTKE | |
| | EWQQGFVFSCSVMHEALHNHYTQKSLSLSPGK | |
| 130 | APELLGGPSVFLFPPKPKDTLMISRTPEVTCVVVDVSHEDPEVKFNW | Clone CH3C.35.21.18 |
| | YVDGVEVHNAKTKPREEQYNSTYRVVSVLTVLHQDWLNGKEYKC | |
| | KVSNKALPAPIEKTISKAKGQPREPQVYTLPPSRDELTKNQVSLTCL | |
| | VKGFYPSDIAVLWESYGTEWSSYRTTPPVLDSDGSFFLYSKLTVTKE | |
| | EWQQGFVFSCSVMHEALHNHYTQKSLSLSPGK | |
| 131 | APELLGGPSVFLFPPKPKDTLMISRTPEVTCVVVDVSHEDPEVKFNW | Clone CH3C.35.20.1 |
| | YVDGVEVHNAKTKPREEQYNSTYRVVSVLTVLHQDWLNGKEYKC | |
| | KVSNKALPAPIEKTISKAKGQPREPQVYTLPPSRDELTKNQVSLTCL | |
| | VKGFYPSDIAVEWESFGTEWSSYKTTPPVLDSDGSFFLYSKLTVTKE | |
| | EWQQGFVFSCSVMHEALHNHYTQKSLSLSPGK | |
| 132 | APELLGGPSVFLFPPKPKDTLMISRTPEVTCVVVDVSHEDPEVKFNW | Clone CH3C.35.20.2 |
| | YVDGVEVHNAKTKPREEQYNSTYRVVSVLTVLHQDWLNGKEYKC | |
| | KVSNKALPAPIEKTISKAKGQPREPQVYTLPPSRDELTKNQVSLTCL | |
| | VKGFYPSDIAVEWESYGTEWASYKTTPPVLDSDGSFFLYSKLTVTKE | |
| | EWQQGFVFSCSVMHEALHNHYTQKSLSLSPGK | |
| 133 | APELLGGPSVFLFPPKPKDTLMISRTPEVTCVVVDVSHEDPEVKFNW | Clone CH3C.35.20.3 |
| | YVDGVEVHNAKTKPREEQYNSTYRVVSVLTVLHQDWLNGKEYKC | |
| | KVSNKALPAPIEKTISKAKGQPREPQVYTLPPSRDELTKNQVSLTCL | |
| | VKGFYPSDIAVEWESYGTEWVSYKTTPPVLDSDGSFFLYSKLTVTKE | |
| | EWQQGFVFSCSVMHEALHNHYTQKSLSLSPGK | |
| 134 | APELLGGPSVFLFPPKPKDTLMISRTPEVTCVVVDVSHEDPEVKFNW | Clone CH3C.35.20.4 |
| | YVDGVEVHNAKTKPREEQYNSTYRVVSVLTVLHQDWLNGKEYKC | |
| | KVSNKALPAPIEKTISKAKGQPREPQVYTLPPSRDELTKNQVSLTCL | |
| | VKGFYPSDIAVEWESYGTEWSSYKTTPPVLDSDGSFFLYSKLTVSKE | |
| | EWQQGFVFSCSVMHEALHNHYTQKSLSLSPGK | |
| 135 | APELLGGPSVFLFPPKPKDTLMISRTPEVTCVVVDVSHEDPEVKFNW | Clone CH3C.35.20.5 |
| | YVDGVEVHNAKTKPREEQYNSTYRVVSVLTVLHQDWLNGKEYKC | |
| | KVSNKALPAPIEKTISKAKGQPREPQVYTLPPSRDELTKNQVSLTCL | |
| | VKGFYPSDIAVEWESFGTEWASYKTTPPVLDSDGSFFLYSKLTVTKE | |
| | EWQQGFVFSCSVMHEALHNHYTQKSLSLSPGK | |
| 136 | APELLGGPSVFLFPPKPKDTLMISRTPEVTCVVVDVSHEDPEVKFNW | Clone CH3C.35.20.6 |
| | YVDGVEVHNAKTKPREEQYNSTYRVVSVLTVLHQDWLNGKEYKC | |
| | KVSNKALPAPIEKTISKAKGQPREPQVYTLPPSRDELTKNQVSLTCL | |
| | VKGFYPSDIAVEWESFGTEWVSYKTTPPVLDSDGSFFLYSKLTVTKE | |
| | EWQQGFVFSCSVMHEALHNHYTQKSLSLSPGK | |
| 137 | APELLGGPSVFLFPPKPKDTLMISRTPEVTCVVVDVSHEDPEVKFNW | Clone CH3C35.21.a.1 |
| | YVDGVEVHNAKTKPREEQYNSTYRVVSVLTVLHQDWLNGKEYKC | |
| | KVSNKALPAPIEKTISKAKGQPREPQVYTLPPSRDELTKNQVSLTCL | |
| | VKGFYPSDIAVVVWESFGTEWSSYKTTPPVLDSDGSFFLYSKLTVTKE | |
| | EWQQGFVFSCSVMHEALHNHYTQKSLSLSPGK | |
| 138 | APELLGGPSVFLFPPKPKDTLMISRTPEVTCVVVDVSHEDPEVKFNW | Clone CH3C.35.21.a.2 |
| | YVDGVEVHNAKTKPREEQYNSTYRVVSVLTVLHQDWLNGKEYKC | |
| | KVSNKALPAPIEKTISKAKGQPREPQVYTLPPSRDELTKNQVSLTCL | |
| | VKGFYPSDIAVVVWESYGTEWASYKTTPPVLDSDGSFFLYSKLTVTK | |
| | EEWQQGFVFSCSVMHEALHNHYTQKSLSLSPGK | |
| 139 | APELLGGPSVFLFPPKPKDTLMISRTPEVTCVVVDVSHEDPEVKFNW | Clone CH3C.35.21.a.3 |
| | YVDGVEVHNAKTKPREEQYNSTYRVVSVLTVLHQDWLNGKEYKC | |
| | KVSNKALPAPIEKTISKAKGQPREPQVYTLPPSRDELTKNQVSLTCL | |
| | VKGFYPSDIAVVVWESYGTEWVSYKTTPPVLDSDGSFFLYSKLTVTK | |
| | EEWQQGFVFSCSVMHEALHNHYTQKSLSLSPGK | |
| 140 | APELLGGPSVFLFPPKPKDTLMISRTPEVTCVVVDVSHEDPEVKFNW | Clone CH3C.35.21.a.4 |
| | YVDGVEVHNAKTKPREEQYNSTYRVVSVLTVLHQDWLNGKEYKC | |
| | KVSNKALPAPIEKTISKAKGQPREPQVYTLPPSRDELTKNQVSLTCL | |
| | VKGFYPSDIAVVVWESYGTEWSSYKTTPPVLDSDGSFFLYSKLTVSK | |
| | EEWQQGFVFSCSVMHEALHNHYTQKSLSLSPGK | |
| 141 | APELLGGPSVFLFPPKPKDTLMISRTPEVTCVVVDVSHEDPEVKFNW | Clone CH3C.35.21.a.5 |
| | YVDGVEVHNAKTKPREEQYNSTYRVVSVLTVLHQDWLNGKEYKC | |
| | KVSNKALPAPIEKTISKAKGQPREPQVYTLPPSRDELTKNQVSLTCL | |
| | VKGFYPSDIAVVVWESFGTEWASYKTTPPVLDSDGSFFLYSKLTVTK | |
| | EEWQQGFVFSCSVMHEALHNHYTQKSLSLSPGK | |
| 142 | APELLGGPSVFLFPPKPKDTLMISRTPEVTCVVVDVSHEDPEVKFNW | Clone CH3C.35.21.a.6 |
| | YVDGVEVHNAKTKPREEQYNSTYRVVSVLTVLHQDWLNGKEYKC | |
| | KVSNKALPAPIEKTISKAKGQPREPQVYTLPPSRDELTKNQVSLTCL | |
| | VKGFYPSDIAVVVWESFGTEWVSYKTTPPVLDSDGSFFLYSKLTVTK | |
| | EEWQQGFVFSCSVMHEALHNHYTQKSLSLSPGK | |
| 143 | APELLGGPSVFLFPPKPKDTLMISRTPEVTCVVVDVSHEDPEVKFNW | Clone CH3C.35.23.1 |
| | YVDGVEVHNAKTKPREEQYNSTYRVVSVLTVLHQDWLNGKEYKC | |
| | KVSNKALPAPIEKTISKAKGQPREPQVYTLPPSRDELTKNQVSLTCL | |
| | VKGFYPSDIAVEWESFGTEWSNYKTTPPVLDSDGSFFLYSKLTVTKE | |
| | EWQQGFVFSCSVMHEALHNHYTQKSLSLSPGK | |
| 144 | APELLGGPSVFLFPPKPKDTLMISRTPEVTCVVVDVSHEDPEVKFNW | Clone CH3C.35.23.2 |
| | YVDGVEVHNAKTKPREEQYNSTYRVVSVLTVLHQDWLNGKEYKC | |
| | KVSNKALPAPIEKTISKAKGQPREPQVYTLPPSRDELTKNQVSLTCL | |
| | VKGFYPSDIAVEWESYGTEWANYKTTPPVLDSDGSFFLYSKLTVTK | |
| | EEWQQGFVFSCSVMHEALHNHYTQKSLSLSPGK | |
| 145 | APELLGGPSVFLFPPKPKDTLMISRTPEVTCVVVDVSHEDPEVKFNW | Clone CH3C.35.23.3 |
| | YVDGVEVHNAKTKPREEQYNSTYRVVSVLTVLHQDWLNGKEYKC | |
| | KVSNKALPAPIEKTISKAKGQPREPQVYTLPPSRDELTKNQVSLTCL | |
| | VKGFYPSDIAVEWESYGTEWVNYKTTPPVLDSDGSFFLYSKLTVTK | |
| | EEWQQGFVFSCSVMHEALHNHYTQKSLSLSPGK | |
| 146 | APELLGGPSVFLFPPKPKDTLMISRTPEVTCVVVDVSHEDPEVKFNW | Clone CH3C.35.23.4 |
| | YVDGVEVHNAKTKPREEQYNSTYRVVSVLTVLHQDWLNGKEYKC | |
| | KVSNKALPAPIEKTISKAKGQPREPQVYTLPPSRDELTKNQVSLTCL | |
| | VKGFYPSDIAVEWESYGTEWSNYKTTPPVLDSDGSFFLYSKLTVSKE | |
| | EWQQGFVFSCSVMHEALHNHYTQKSLSLSPGK | |
| 147 | APELLGGPSVFLFPPKPKDTLMISRTPEVTCVVVDVSHEDPEVKFNW | Clone CH3C.35.23.5 |
| | YVDGVEVHNAKTKPREEQYNSTYRVVSVLTVLHQDWLNGKEYKC | |
| | KVSNKALPAPIEKTISKAKGQPREPQVYTLPPSRDELTKNQVSLTCL | |
| | VKGFYPSDIAVEWESFGTEWANYKTTPPVLDSDGSFFLYSKLTVTKE | |
| | EWQQGFVFSCSVMHEALHNHYTQKSLSLSPGK | |
| 148 | APELLGGPSVFLFPPKPKDTLMISRTPEVTCVVVDVSHEDPEVKFNW | Clone CH3C.35.23.6 |
| | YVDGVEVHNAKTKPREEQYNSTYRVVSVLTVLHQDWLNGKEYKC | |
| | KVSNKALPAPIEKTISKAKGQPREPQVYTLPPSRDELTKNQVSLTCL | |
| | VKGFYPSDIAVEWESFGTEWVNYKTTPPVLDSDGSFFLYSKLTVTKE | |
| | EWQQGFVFSCSVMHEALHNHYTQKSLSLSPGK | |
| 149 | APELLGGPSVFLFPPKPKDTLMISRTPEVTCVVVDVSHEDPEVKFNW | Clone CH3C.35.24.1 |
| | YVDGVEVHNAKTKPREEQYNSTYRVVSVLTVLHQDWLNGKEYKC | |
| | KVSNKALPAPIEKTISKAKGQPREPQVYTLPPSRDELTKNQVSLTCL | |
| | VKGFYPSDIAVVVWESFGTEWSNYKTTPPVLDSDGSFFLYSKLTVTK | |
| | EEWQQGFVFSCSVMHEALHNHYTQKSLSLSPGK | |
| 150 | APELLGGPSVFLFPPKPKDTLMISRTPEVTCVVVDVSHEDPEVKFNW | Clone CH3C.35.24.2 |
| | YVDGVEVHNAKTKPREEQYNSTYRVVSVLTVLHQDWLNGKEYKC | |
| | KVSNKALPAPIEKTISKAKGQPREPQVYTLPPSRDELTKNQVSLTCL | |
| | VKGFYPSDIAVVVWESYGTEWANYKTTPPVLDSDGSFFLYSKLTVTK | |
| | EEWQQGFVFSCSVMHEALHNHYTQKSLSLSPGK | |
| 151 | APELLGGPSVFLFPPKPKDTLMISRTPEVTCVVVDVSHEDPEVKFNW | Clone CH3C.35.24.3 |
| | YVDGVEVHNAKTKPREEQYNSTYRVVSVLTVLHQDWLNGKEYKC | |
| | KVSNKALPAPIEKTISKAKGQPREPQVYTLPPSRDELTKNQVSLTCL | |
| | VKGFYPSDIAVVVWESYGTEWVNYKTTPPVLDSDGSFFLYSKLTVTK | |
| | EEWQQGFVFSCSVMHEALHNHYTQKSLSLSPGK | |
| 152 | APELLGGPSVFLFPPKPKDTLMISRTPEVTCVVVDVSHEDPEVKFNW | Clone CH3C.35.24.4 |
| | YVDGVEVHNAKTKPREEQYNSTYRVVSVLTVLHQDWLNGKEYKC | |
| | KVSNKALPAPIEKTISKAKGQPREPQVYTLPPSRDELTKNQVSLTCL | |
| | VKGFYPSDIAVVVWESYGTEWSNYKTTPPVLDSDGSFFLYSKLTVSK | |
| | EEWQQGFVFSCSVMHEALHNHYTQKSLSLSPGK | |
| 153 | APELLGGPSVFLFPPKPKDTLMISRTPEVTCVVVDVSHEDPEVKFNW | Clone CH3C.35.24.5 |
| | YVDGVEVHNAKTKPREEQYNSTYRVVSVLTVLHQDWLNGKEYKC | |
| | KVSNKALPAPIEKTISKAKGQPREPQVYTLPPSRDELTKNQVSLTCL | |
| | VKGFYPSDIAVVVWESFGTEWANYKTTPPVLDSDGSFFLYSKLTVTK | |
| | EEWQQGFVFSCSVMHEALHNHYTQKSLSLSPGK | |
| 154 | APELLGGPSVFLFPPKPKDTLMISRTPEVTCVVVDVSHEDPEVKFNW | Clone CH3C.35.24.6 |
| | YVDGVEVHNAKTKPREEQYNSTYRVVSVLTVLHQDWLNGKEYKC | |
| | KVSNKALPAPIEKTISKAKGQPREPQVYTLPPSRDELTKNQVSLTCL | |
| | VKGFYPSDIAVVVWESFGTEWVNYKTTPPVLDSDGSFFLYSKLTVTK | |
| | EEWQQGFVFSCSVMHEALHNHYTQKSLSLSPGK | |
| 155 | APELLGGPSVFLFPPKPKDTLMISRTPEVTCVVVDVSHEDPEVKFNW | Clone CH3C.35.21.17.1 |
| | YVDGVEVHNAKTKPREEQYNSTYRVVSVLTVLHQDWLNGKEYKC | |
| | KVSNKALPAPIEKTISKAKGQPREPQVYTLPPSRDELTKNQVSLTCL | |
| | VKGFYPSDIAVLWESFGTEWSSYKTTPPVLDSDGSFFLYSKLTVTKE | |
| | EWQQGFVFSCSVMHEALHNHYTQKSLSLSPGK | |
| 156 | APELLGGPSVFLFPPKPKDTLMISRTPEVTCVVVDVSHEDPEVKFNW | Clone CH3C.35.21.17.2 |
| | YVDGVEVHNAKTKPREEQYNSTYRVVSVLTVLHQDWLNGKEYKC | |
| | KVSNKALPAPIEKTISKAKGQPREPQVYTLPPSRDELTKNQVSLTCL | |
| | VKGFYPSDIAVLWESYGTEWASYKTTPPVLDSDGSFFLYSKLTVTKE | |
| | EWQQGFVFSCSVMHEALHNHYTQKSLSLSPGK | |
| 157 | APELLGGPSVFLFPPKPKDTLMISRTPEVTCVVVDVSHEDPEVKFNW | Clone CH3C.35.21.17.3 |
| | YVDGVEVHNAKTKPREEQYNSTYRVVSVLTVLHQDWLNGKEYKC | |
| | KVSNKALPAPIEKTISKAKGQPREPQVYTLPPSRDELTKNQVSLTCL | |
| | VKGFYPSDIAVLWESYGTEWVSYKTTPPVLDSDGSFFLYSKLTVTKE | |
| | EWQQGFVFSCSVMHEALHNHYTQKSLSLSPGK | |
| 158 | APELLGGPSVFLFPPKPKDTLMISRTPEVTCVVVDVSHEDPEVKFNW | Clone CH3C.35.21.17.4 |
| | YVDGVEVHNAKTKPREEQYNSTYRVVSVLTVLHQDWLNGKEYKC | |
| | KVSNKALPAPIEKTISKAKGQPREPQVYTLPPSRDELTKNQVSLTCL | |
| | VKGFYPSDIAVLWESYGTEWSSYKTTPPVLDSDGSFFLYSKLTVSKE | |
| | EWQQGFVFSCSVMHEALHNHYTQKSLSLSPGK | |
| 159 | APELLGGPSVFLFPPKPKDTLMISRTPEVTCVVVDVSHEDPEVKFNW | Clone CH3C.35.21.17.5 |
| | YVDGVEVHNAKTKPREEQYNSTYRVVSVLTVLHQDWLNGKEYKC | |
| | KVSNKALPAPIEKTISKAKGQPREPQVYTLPPSRDELTKNQVSLTCL | |
| | VKGFYPSDIAVLWESFGTEWASYKTTPPVLDSDGSFFLYSKLTVTKE | |
| | EWQQGFVFSCSVMHEALHNHYTQKSLSLSPGK | |
| 160 | APELLGGPSVFLFPPKPKDTLMISRTPEVTCVVVDVSHEDPEVKFNW | Clone CH3C.35.21.7.6 |
| | YVDGVEVHNAKTKPREEQYNSTYRVVSVLTVLHQDWLNGKEYKC | |
| | KVSNKALPAPIEKTISKAKGQPREPQVYTLPPSRDELTKNQVSLTCL | |
| | VKGFYPSDIAVLWESFGTEWVSYKTTPPVLDSDGSFFLYSKLTVTKE | |
| | EWQQGFVFSCSVMHEALHNHYTQKSLSLSPGK | |
| 161 | APELLGGPSVFLFPPKPKDTLMISRTPEVTCVVVDVSHEDPEVKFNW | Clone CH3C.35.N390 |
| | YVDGVEVHNAKTKPREEQYNSTYRVVSVLTVLHQDWLNGKEYKC | |
| | KVSNKALPAPIEKTISKAKGQPREPQVYTLPPSRDELTKNQVSLTCL | |
| | VKGFYPSDIAVEWESYGTEWSNYKTTPPVLDSDGSFFLYSKLTVTKS | |
| | EWQQGFVFSCSVMHEALHNHYTQKSLSLSPGK | |
| 162 | APELLGGPSVFLFPPKPKDTLMISRTPEVTCVVVDVSHEDPEVKFNW | Clone CH3C.35.16 |
| | YVDGVEVHNAKTKPREEQYNSTYRVVSVLTVLHQDWLNGKEYKC | |
| | KVSNKALPAPIEKTISKAKGQPREPQVYTLPPSRDELTKNQVSLTCL | |
| | VKGFYPSDIAVVVWESLGHVVVVNQKTTPPVLDSDGSFFLYSKLTVPK | |
| | STWQQGWVFSCSVMHEALHNHYTQKSLSLSPGK | |
| 163 | APELLGGPSVFLFPPKPKDTLMISRTPEVTCVVVDVSHEDPEVKFNW | Clone CH3C.35.17 |
| | YVDGVEVHNAKTKPREEQYNSTYRVVSVLTVLHQDWLNGKEYKC | |
| | KVSNKALPAPIEKTISKAKGQPREPQVYTLPPSRDELTKNQVSLTCL | |
| | VKGFYPSDIAVEWESLGHVWVNQQTTPPVLDSDGSFFLYSKLTVPK | |
| | STWQQGWVFSCSVMHEALHNHYTQKSLSLSPGK | |
| 164 | APELLGGPSVFLFPPKPKDTLMISRTPEVTCVVVDVSHEDPEVKFNW | Clone CH3C.35.18 |
| | YVDGVEVHNAKTKPREEQYNSTYRVVSVLTVLHQDWLNGKEYKC | |
| | KVSNKALPAPIEKTISKAKGQPREPQVYTLPPSRDELTKNQVSLTCL | |
| | VKGFYPSDIAVWWESLGHVWVNQQTTPPVLDSDGSFFLYSKLTVPK | |
| | STWQQGWVFSCSVMHEALHNHYTQKSLSLSPGK | |
| 165 | APEAAGGPSVFLFPPKPKDTLYITREPEVTCVVVDVSHEDPEVKFNW | Clone CH3C.35.8 |
| | YVDGVEVHNAKTKPREEQYNSTYRVVSVLTVLHQDWLNGKEYKC | (Clone CH3C.35.20 with |
| | KVSNKALGAPIEKTISKAKGQPREPQVYTLPPSRDELTKNQVSLTCL | YTE and LALAPG |
| | VKGFYPSDIAVEWESYGTEWSSYKTTPPVLDSDGSFFLYSKLTVTKE | mutations) |
| | EWQQGFVFSCSVMHEALHNHYTQKSLSLSPGK | |
| 166 | APEAAGGPSVFLFPPKPKDTLYITREPEVTCVVVDVSHEDPEVKFNW | Clone CH3C.35.9 |
| | YVDGVEVHNAKTKPREEQYNSTYRVVSVLTVLHQDWLNGKEYKC | (Clone CH3C.35.21 with |
| | KVSNKALGAPIEKTISKAKGQPREPQVYTLPPSRDELTKNQVSLTCL | YTE and LALAPG |
| | VKGFYPSDIAVEWESFGTEWSSYKTTPPVLDSDGSFFLYSKLTVTKE | mutations) |
| | EWQQGFVFSCSVMHEALHNHYTQKSLSLSPGK | |
| 167 | APELLGGPSVFLFPPKPKDTLMISRTPEVTCVVVDVSHEDPEVKFNW | Clone CH3C.35.20.1 with |
| | YVDGVEVHNAKTKPREEQYNSTYRVVSVLTVLHQDWLNGKEYKC | knob mutation |
| | KVSNKALPAPIEKTISKAKGQPREPQVYTLPPSRDELTKNQVSLWCL | |
| | VKGFYPSDIAVEWESFGTEWSSYKTTPPVLDSDGSFFLYSKLTVTKE | |
| | EWQQGFVFSCSVMHEALHNHYTQKSLSLSPGK | |
| 168 | APEAAGGPSVFLFPPKPKDTLMISRTPEVTCVVVDVSHEDPEVKFNW | Clone CH3C.35.20.1 with |
| | YVDGVEVHNAKTKPREEQYNSTYRVVSVLTVLHQDWLNGKEYKC | knob and LALA mutations |
| | KVSNKALPAPIEKTISKAKGQPREPQVYTLPPSRDELTKNQVSLWCL | |
| | VKGFYPSDIAVEWESFGTEWSSYKTTPPVLDSDGSFFLYSKLTVTKE | |
| | EWQQGFVFSCSVMHEALHNHYTQKSLSLSPGK | |
| 169 | APEAAGGPSVFLFPPKPKDTLMISRTPEVTCVVVDVSHEDPEVKFNW | Clone CH3C.35.20.1 with |
| | YVDGVEVHNAKTKPREEQYNSTYRVVSVLTVLHQDWLNGKEYKC | knob and LALAPG |
| | KVSNKALGAPIEKTISKAKGQPREPQVYTLPPSRDELTKNQVSLWCL | mutations |
| | VKGFYPSDIAVEWESFGTEWSSYKTTPPVLDSDGSFFLYSKLTVTKE | |
| | EWQQGFVFSCSVMHEALHNHYTQKSLSLSPGK | |
| 170 | APELLGGPSVFLFPPKPKDTLYITREPEVTCVVVDVSHEDPEVKFNW | Clone CH3C.35.20.1 with |
| | YVDGVEVHNAKTKPREEQYNSTYRVVSVLTVLHQDWLNGKEYKC | knob and YTE mutations |
| | KVSNKALPAPIEKTISKAKGQPREPQVYTLPPSRDELTKNQVSLWCL | |
| | VKGFYPSDIAVEWESFGTEWSSYKTTPPVLDSDGSFFLYSKLTVTKE | |
| | EWQQGFVFSCSVMHEALHNHYTQKSLSLSPGK | |
| 171 | APEAAGGPSVFLFPPKPKDTLYITREPEVTCVVVDVSHEDPEVKFNW | Clone CH3C.35.20.1 with |
| | YVDGVEVHNAKTKPREEQYNSTYRVVSVLTVLHQDWLNGKEYKC | knob, LALA, and YTE |
| | KVSNKALPAPIEKTISKAKGQPREPQVYTLPPSRDELTKNQVSLWCL | mutations |
| | VKGFYPSDIAVEWESFGTEWSSYKTTPPVLDSDGSFFLYSKLTVTKE | |
| | EWQQGFVFSCSVMHEALHNHYTQKSLSLSPGK | |
| 172 | APEAAGGPSVFLFPPKPKDTLYITREPEVTCVVVDVSHEDPEVKFNW | Clone CH3C.35.20.1 with |
| | YVDGVEVHNAKTKPREEQYNSTYRVVSVLTVLHQDWLNGKEYKC | knob, LALAPG, and YTE |
| | KVSNKALGAPIEKTISKAKGQPREPQVYTLPPSRDELTKNQVSLWCL | mutations |
| | VKGFYPSDIAVEWESFGTEWSSYKTTPPVLDSDGSFFLYSKLTVTKE | |
| | EWQQGFVFSCSVMHEALHNHYTQKSLSLSPGK | |
| 173 | APELLGGPSVFLFPPKPKDTLMISRTPEVTCVVVDVSHEDPEVKFNW | Clone CH3C.35.20.1 with |
| | YVDGVEVHNAKTKPREEQYNSTYRVVSVLTVLHQDWLNGKEYKC | hole mutations |
| | KVSNKALPAPIEKTISKAKGQPREPQVYTLPPSRDELTKNQVSLSCA | |
| | VKGFYPSDIAVEWESFGTEWSSYKTTPPVLDSDGSFFLVSKLTVTKE | |
| | EWQQGFVFSCSVMHEALHNHYTQKSLSLSPGK | |
| 174 | APEAAGGPSVFLFPPKPKDTLMISRTPEVTCVVVDVSHEDPEVKFNW | Clone CH3C.35.20.1 with |
| | YVDGVEVHNAKTKPREEQYNSTYRVVSVLTVLHQDWLNGKEYKC | hole and LALA mutations |
| | KVSNKALPAPIEKTISKAKGQPREPQVYTLPPSRDELTKNQVSLSCA | |
| | VKGFYPSDIAVEWESFGTEWSSYKTTPPVLDSDGSFFLVSKLTVTKE | |
| | EWQQGFVFSCSVMHEALHNHYTQKSLSLSPGK | |
| 175 | APEAAGGPSVFLFPPKPKDTLMISRTPEVTCVVVDVSHEDPEVKFNW | Clone CH3C.35.20.1 with |
| | YVDGVEVHNAKTKPREEQYNSTYRVVSVLTVLHQDWLNGKEYKC | hole and LALAPG |
| | KVSNKALGAPIEKTISKAKGQPREPQVYTLPPSRDELTKNQVSLSCA | mutations |
| | VKGFYPSDIAVEWESFGTEWSSYKTTPPVLDSDGSFFLVSKLTVTKE | |
| | EWQQGFVFSCSVMHEALHNHYTQKSLSLSPGK | |
| 176 | APELLGGPSVFLFPPKPKDTLYITREPEVTCVVVDVSHEDPEVKFNW | Clone CH3C.35.20.1 with |
| | YVDGVEVHNAKTKPREEQYNSTYRVVSVLTVLHQDWLNGKEYKC | hole and YTE mutations |
| | KVSNKALPAPIEKTISKAKGQPREPQVYTLPPSRDELTKNQVSLSCA | |
| | VKGFYPSDIAVEWESFGTEWSSYKTTPPVLDSDGSFFLVSKLTVTKE | |
| | EWQQGFVFSCSVMHEALHNHYTQKSLSLSPGK | |
| 177 | APEAAGGPSVFLFPPKPKDTLYITREPEVTCVVVDVSHEDPEVKFNW | Clone CH3C.35.20.1 with |
| | YVDGVEVHNAKTKPREEQYNSTYRVVSVLTVLHQDWLNGKEYKC | hole, LALA, and YTE |
| | KVSNKALPAPIEKTISKAKGQPREPQVYTLPPSRDELTKNQVSLSCA | mutations |
| | VKGFYPSDIAVEWESFGTEWSSYKTTPPVLDSDGSFFLVSKLTVTKE | |
| | EWQQGFVFSCSVMHEALHNHYTQKSLSLSPGK | |
| 178 | APEAAGGPSVFLFPPKPKDTLYITREPEVTCVVVDVSHEDPEVKFNW | Clone CH3C.35.20.1 with |
| | YVDGVEVHNAKTKPREEQYNSTYRVVSVLTVLHQDWLNGKEYKC | hole, LALAPG, and YTE |
| | KVSNKALGAPIEKTISKAKGQPREPQVYTLPPSRDELTKNQVSLSCA | mutations |
| | VKGFYPSDIAVEWESFGTEWSSYKTTPPVLDSDGSFFLVSKLTVTKE | |
| | EWQQGFVFSCSVMHEALHNHYTQKSLSLSPGK | |
| 179 | APELLGGPSVFLFPPKPKDTLMISRTPEVTCVVVDVSHEDPEVKFNW | Clone CH3C.35.23.2 with |
| | YVDGVEVHNAKTKPREEQYNSTYRVVSVLTVLHQDWLNGKEYKC | knob mutation |
| | KVSNKALPAPIEKTISKAKGQPREPQVYTLPPSRDELTKNQVSLWCL | |
| | VKGFYPSDIAVEWESYGTEWANYKTTPPVLDSDGSFFLYSKLTVTK | |
| | EEWQQGFVFSCSVMHEALHNHYTQKSLSLSPGK | |
| 180 | APEAAGGPSVFLFPPKPKDTLMISRTPEVTCVVVDVSHEDPEVKFNW | Clone CH3C.35.23.2 with |
| | YVDGVEVHNAKTKPREEQYNSTYRVVSVLTVLHQDWLNGKEYKC | knob and LALA mutations |
| | KVSNKALPAPIEKTISKAKGQPREPQVYTLPPSRDELTKNQVSLWCL | |
| | VKGFYPSDIAVEWESYGTIEWANYKTTPPVLDSDGSFFLYSKLTVTK | |
| | EEWQQGFVFSCSVMHEALHNHYTQKSLSLSPGK | |
| 181 | APEAAGGPSVFLFPPKPKDTLMISRTPEVTCVVVDVSHEDPEVKFNW | Clone CH3C.35.23.2 with |
| | YVDGVEVHNAKTKPREEQYNSTYRVVSVLTVLHQDWLNGKEYKC | knob and LALAPG |
| | KVSNKALGAPIEKTISKAKGQPREPQVYTLPPSRDELTKNQVSLWCL | mutations |
| | VKGFYPSDIAVEWESYGTEWANYKTTPPVLDSDGSFFLYSKLTVTK | |
| | EEWQQGFVFSCSVMHEALHNHYTQKSLSLSPGK | |
| 182 | APELLGGPSVFLFPPKPKDTLYITREPEVTCVVVDVSHEDPEVKFNW | Clone H3 35.23.2 with |
| | YVDGVEVHNAKTKPREEQYNSTYRVVSVLTVLHQDWLNGKEYKC | knob and YTE mutations |
| | KVSNKALPAPIEKTISKAKGQPREPQVYTLPPSRDELTKNQVSLWCL | |
| | VKGFYPSDIAVEWESYGTEWANYKTTPPVLDSDGSFFLYSKLTVTK | |
| | EEWQQGFVFSCSVMHEALHNHYTQKSLSLSPGK | |
| 183 | APEAAGGPSVFLFPPKPKDTLYITREPEVTCVVVDVSHEDPEVKFNW | Clone CH3C.35.23.2 with |
| | YVDGVEVHNAKTKPREEQYNSTYRVVSVLTVLHQDWLNGKEYKC | knob, LALA, and YTE |
| | KVSNKALPAPIEKTISKAKGQPREPQVYTLPPSRDELTKNQVSLWCL | mutations |
| | VKGFYPSDIAVEWESYGTEWANYKTTPPVLDSDGSFFLYSKLTVTK | |
| | EEWQQGFVFSCSVMHEALHNHYTQKSLSLSPGK | |
| 184 | APEAAGGPSVFLFPPKPKDTLYITREPEVTCVVVDVSHEDPEVKFNW | Clone CH3C.35.23.2 with |
| | YVDGVEVHNAKTKPREEQYNSTYRVVSVLTVLHQDWLNGKEYKC | knob, LALAPG, and YTE |
| | KVSNKALGAPIEKTISKAKGQPREPQVYTLPPSRDELTKNQVSLWCL | mutations |
| | VKGFYPSDIAVEWESYGTEWANYKTTPPVLDSDGSFFLYSKLTVTK | |
| | EEWQQGFVFSCSVMHEALHNHYTQKSLSLSPGK | |
| 185 | APELLGGPSVFLFPPKPKDTLMISRTPEVTCVVVDVSHEDPEVKFNW | Clone CH3C.35.23.2 with |
| | YVDGVEVHNAKTKPREEQYNSTYRVVSVLTVLHQDWLNGKEYKC | hole mutations |
| | KVSNKALPAPIEKTISKAKGQPREPQVYTLPPSRDELTKNQVSLSCA | |
| | VKGFYPSDIAVEWESYGTEWANYKTTPPVLDSDGSFFLVSKLTVTK | |
| | EEWQQGFVFSCSVMHEALHNHYTQKSLSLSPGK | |
| 186 | APEAAGGPSVFLFPPKPKDTLMISRTPEVTCVVVDVSHEDPEVKFNW | Clone CH3C.35.23.2 with |
| | YVDGVEVHNAKTKPREEQYNSTYRVVSVLTVLHQDWLNGKEYKC | hole and LALA mutations |
| | KVSNKALPAPIEKTISKAKGQPREPQVYTLPPSRDELTKNQVSLSCA | |
| | VKGFYPSDIAVEWESYGTEWANYKTTPPVLDSDGSFFLVSKLTVTK | |
| | EEWQQGFVFSCSVMHEALHNHYTQKSLSLSPGK | |
| 187 | APEAAGGPSVFLFPPKPKDTLMISRTPEVTCVVVDVSHEDPEVKFNW | Clone CH3C.35.23.2 with |
| | YVDGVEVHNAKTKPREEQYNSTYRVVSVLTVLHQDWLNGKEYKC | hole and LALAPG |
| | KVSNKALGAPIEKTISKAKGQPREPQVYTLPPSRDELTKNQVSLSCA | mutations |
| | VKGFYPSDIAVEWESYGTEWANYKTTPPVLDSDGSFFLVSKLTVTK | |
| | EEWQQGFVFSCSVMHEALHNHYTQKSLSLSPGK | |
| 188 | APELLGGPSVFLFPPKPKDTLYITREPEVTCVVVDVSHEDPEVKFNW | Clone CH3C.35.23.2 with |
| | YVDGVEVHNAKTKPREEQYNSTYRVVSVLTVLHQDWLNGKEYKC | hole and YTE mutations |
| | KVSNKALPAPIEKTISKAKGQPREPQVYTLPPSRDELTKNQVSLSCA | |
| | VKGFYPSDIAVEWESYGTEWANYKTTPPVLDSDGSFFLVSKLTVTK | |
| | EEWQQGFVFSCSVMHEALHNHYTQKSLSLSPGK | |
| 189 | APEAAGGPSVFLFPPKPKDTLYITREPEVTCVVVDVSHEDPEVKFNW | Clone CH3C.35.23.2 with |
| | YVDGVEVHNAKTKPREEQYNSTYRVVSVLTVLHQDWLNGKEYKC | hole, LALA, and YTE |
| | KVSNKALPAPIEKTISKAKGQPREPQVYTLPPSRDELTKNQVSLSCA | mutations |
| | VKGFYPSDIAVEWESYGTEWANYKTTPPVLDSDGSFFLVSKLTVTK | |
| | EEWQQGFVFSCSVMHEALHNHYTQKSLSLSPGK | |
| 190 | APEAAGGPSVFLFPPKPKDTLYITREPEVTCVVVDVSHEDPEVKFNW | Clone CH3C.35.23.2 with |
| | YVDGVEVHNAKTKPREEQYNSTYRVVSVLTVLHQDWLNGKEYKC | hole, LALAPG, and YTE |
| | KVSNKALGAPIEKTISKAKGQPREPQVYTLPPSRDELTKNQVSLSCA | mutations |
| | VKGFYPSDIAVEWESYGTEWANYKTTPPVLDSDGSFFLVSKLTVTK | |
| | EEWQQGFVFSCSVMHEALHNHYTQKSLSLSPGK | |
| 191 | APELLGGPSVFLFPPKPKDTLMISRTPEVTCVVVDVSHEDPEVKFNW | Clone CH3C.35.23.3 with |
| | YVDGVEVHNAKTKPREEQYNSTYRVVSVLTVLHQDWLNGKEYKC | knob mutation |
| | KVSNKALPAPIEKTISKAKGQPREPQVYTLPPSRDELTKNQVSLWCL | |
| | VKGFYPSDIAVEWESYGTEWVNYKTTPPVLDSDGSFFLYSKLTVTK | |
| | EEWQQGFVFSCSVMHEALHNHYTQKSLSLSPGK | |
| 192 | APEAAGGPSVFLFPPKPKDTLMISRTPEVTCVVVDVSHEDPEVKFNW | Clone CH3C.35.23.3 with |
| | YVDGVEVHNAKTKPREEQYNSTYRVVSVLTVLHQDWLNGKEYKC | knob and LALA mutations |
| | KVSNKALPAPIEKTISKAKGQPREPQVYTLPPSRDELTKNQVSLWCL | |
| | VKGFYPSDIAVEWESYGTEWVNYKTTPPVLDSDGSFFLYSKLTVTK | |
| | EEWQQGFVFSCSVMHEALHNHYTQKSLSLSPGK | |
| 193 | APEAAGGPSVFLFPPKPKDTLMISRTPEVTCVVVDVSHEDPEVKFNW | Clone CH3C.35.23.3 with |
| | YVDGVEVHNAKTKPREEQYNSTYRVVSVLTVLHQDWLNGKEYKC | knob and LALAPG |
| | KVSNKALGAPIEKTISKAKGQPREPQVYTLPPSRDELTKNQVSLWCL | mutations |
| | VKGFYPSDIAVEWESYGTEWVNYKTTPPVLDSDGSFFLYSKLTVTK | |
| | EEWQQGFVFSCSVMHEALHNHYTQKSLSLSPGK | |
| 194 | APELLGGPSVFLFPPKPKDTLYITREPEVTCVVVDVSHEDPEVKFNW | Clone CH3C.35.23.3 with |
| | YVDGVEVHNAKTKPREEQYNSTYRVVSVLTVLHQDWLNGKEYKC | knob and YTE mutations |
| | KVSNKALPAPIEKTISKAKGQPREPQVYTLPPSRDELTKNQVSLWCL | |
| | VKGFYPSDIAVEWESYGTEWVNYKTTPPVLDSDGSFFLYSKLTVTK | |
| | EEWQQGFVFSCSVMHEALHNHYTQKSLSLSPGK | |
| 195 | APEAAGGPSVFLFPPKPKDTLYITREPEVTCVVVDVSHEDPEVKFNW | Clone CH3C.35.23.3 with |
| | YVDGVEVHNAKTKPREEQYNSTYRVVSVLTVLHQDWLNGKEYKC | knob, LALA, and YTE |
| | KVSNKALPAPIEKTISKAKGQPREPQVYTLPPSRDELTKNQVSLWCL | mutations |
| | VKGFYPSDIAVEWESYGTEWVNYKTTPPVLDSDGSFFLYSKLTVTK | |
| | EEWQQGFVFSCSVMHEALHNHYTQKSLSLSPGK | |
| 196 | APEAAGGPSVFLFPPKPKDTLYITREPEVTCVVVDVSHEDPEVKFNW | Clone CH3C.35.23.3 with |
| | YVDGVEVHNAKTKPREEQYNSTYRVVSVLTVLHQDWLNGKEYKC | knob, LALAPG, and YTE |
| | KVSNKALGAPIEKTISKAKGQPREPQVYTLPPSRDELTKNQVSLWCL | mutations |
| | VKGFYPSDIAVEWESYGTEWVNYKTTPPVLDSDGSFFLYSKLTVTK | |
| | EEWQQGFVFSCSVMHEALHNHYTQKSLSLSPGK | |
| 197 | APELLGGPSVFLFPPKPKDTLMISRTPEVTCVVVDVSHEDPEVKFNW | Clone CH3C.35.23.3 with |
| | YVDGVEVHNAKTKPREEQYNSTYRVVSVLTVLHQDWLNGKEYKC | hole mutations |
| | KVSNKALPAPIEKTISKAKGQPREPQVYTLPPSRDELTKNQVSLSCA | |
| | VKGFYPSDIAVEWESYGTEWVNYKTTPPVLDSDGSFFLVSKLTVTK | |
| | EEWQQGFVFSCSVMHEALHNHYTQKSLSLSPGK | |
| 198 | APEAAGGPSVFLFPPKPKDTLMISRTPEVTCVVVDVSHEDPEVKFNW | Clone CH3C.35.23.3 with |
| | YVDGVEVHNAKTKPREEQYNSTYRVVSVLTVLHQDWLNGKEYKC | hole and LALA mutations |
| | KVSNKALPAPIEKTISKAKGQPREPQVYTLPPSRDELTKNQVSLSCA | |
| | VKGFYPSDIAVEWESYGTEWVNYKTTPPVLDSDGSFFLVSKLTVTK | |
| | EEWQQGFVFSCSVMHEALHNHYTQKSLSLSPGK | |
| 199 | APEAAGGPSVFLFPPKPKDTLMISRTPEVTCVVVDVSHEDPEVKFNW | Clone CH3C.35.23.3 with |
| | YVDGVEVHNAKTKPREEQYNSTYRVVSVLTVLHQDWLNGKEYKC | hole and LALAPG |
| | KVSNKALGAPIEKTISKAKGQPREPQVYTLPPSRDELTKNQVSLSCA | mutations |
| | VKGFYPSDIAVEWESYGTEWVNYKTTPPVLDSDGSFFLVSKLTVTK | |
| | EEWQQGFVFSCSVMHEALHNHYTQKSLSLSPGK | |
| 200 | APELLGGPSVFLFPPKPKDTLYITREPEVTCVVVDVSHEDPEVKFNW | Clone CH3C.35.23.3 with |
| | YVDGVEVHNAKTKPREEQYNSTYRVVSVLTVLHQDWLNGKEYKC | hole and YTE mutations |
| | KVSNKALPAPIEKTISKAKGQPREPQVYTLPPSRDELTKNQVSLSCA | |
| | VKGFYPSDIAVEWESYGTEWVNYKTTPPVLDSDGSFFLVSKLTVTK | |
| | EEWQQGFVFSCSVMHEALHNHYTQKSLSLSPGK | |
| 201 | APEAAGGPSVFLFPPKPKDTLYITREPEVTCVVVDVSHEDPEVKFNW | Clone CH3C.35.23.3 with |
| | YVDGVEVHNAKTKPREEQYNSTYRVVSVLTVLHQDWLNGKEYKC | hole, LALA, and YTE |
| | KVSNKALPAPIEKTISKAKGQPREPQVYTLPPSRDELTKNQVSLSCA | mutations |
| | VKGFYPSDIAVEWESYGTEWVNYKTTPPVLDSDGSFFLVSKLTVTK | |
| | EEWQQGFVFSCSVMHEALHNHYTQKSLSLSPGK | |
| 202 | APEAAGGPSVFLFPPKPKDTLYITREPEVTCVVVDVSHEDPEVKFNW | Clone CH3C.35.23.3 with |
| | YVDGVEVHNAKTKPREEQYNSTYRVVSVLTVLHQDWLNGKEYKC | hole, LALAPG, and YTE |
| | KVSNKALGAPIEKTISKAKGQPREPQVYTLPPSRDELTKNQVSLSCA | mutations |
| | VKGFYPSDIAVEWESYGTEWVNYKTTPPVLDSDGSFFLVSKLTVTK | |
| | EEWQQGFVFSCSVMHEALHNHYTQKSLSLSPGK | |
| 203 | APELLGGPSVFLFPPKPKDTLMISRTPEVTCVVVDVSHEDPEVKFNW | Clone CH3C.35.23.4 with |
| | YVDGVEVHNAKTKPREEQYNSTYRVVSVLTVLHQDWLNGKEYKC | knob mutation |
| | KVSNKALPAPIEKTISKAKGQPREPQVYTLPPSRDELTKNQVSLWCL | |
| | VKGFYPSDIAVEWESYGTEWSNYKTTPPVLDSDGSFFLYSKLTVSKE | |
| | EWQQGFVFSCSVMHEALHNHYTQKSLSLSPGK | |
| 204 | APEAAGGPSVFLFPPKPKDTLMISRTPEVTCVVVDVSHEDPEVKFNW | Clone H3 35.23.4 with |
| | YVDGVEVHNAKTKPREEQYNSTYRVVSVLTVLHQDWLNGKEYKC | knob and LALA mutations |
| | KVSNKALPAPIEKTISKAKGQPREPQVYTLPPSRDELTKNQVSLWCL | |
| | VKGFYPSDIAVEWESYGTEWSNYKTTPPVLDSDGSFFLYSKLTVSKE | |
| | EWQQGFVFSCSVMHEALHNHYTQKSLSLSPGK | |
| 205 | APEAAGGPSVFLFPPKPKDTLMISRTPEVTCVVVDVSHEDPEVKFNW | Clone CH3C.35.23.4 with |
| | YVDGVEVHNAKTKPREEQYNSTYRVVSVLTVLHQDWLNGKEYKC | knob and LALAPG |
| | KVSNKALGAPIEKTISKAKGQPREPQVYTLPPSRDELTKNQVSLWCL | mutations |
| | VKGFYPSDIAVEWESYGTEWSNYKTTPPVLDSDGSFFLYSKLTVSKE | |
| | EWQQGFVFSCSVMHEALHNHYTQKSLSLSPGK | |
| 206 | APELLGGPSVFLFPPKPKDTLYITREPEVTCVVVDVSHEDPEVKFNW | Clone CH3C.35.23.4 with |
| | YVDGVEVHNAKTKPREEQYNSTYRVVSVLTVLHQDWLNGKEYKC | knob and YTE mutations |
| | KVSNKALPAPIEKTISKAKGQPREPQVYTLPPSRDELTKNQVSLWCL | |
| | VKGFYPSDIAVEWESYGTEWSNYKTTPPVLDSDGSFFLYSKLTVSKE | |
| | EWQQGFVFSCSVMHEALHNHYTQKSLSLSPGK | |
| 207 | APEAAGGPSVFLFPPKPKDTLYITREPEVTCVVVDVSHEDPEVKFNW | Clone CH3C.35.23.4 with |
| | YVDGVEVHNAKTKPREEQYNSTYRVVSVLTVLHQDWLNGKEYKC | knob, LALA, and YTE |
| | KVSNKALPAPIEKTISKAKGQPREPQVYTLPPSRDELTKNQVSLWCL | mutations |
| | VKGFYPSDIAVEWESYGTEWSNYKTTPPVLDSDGSFFLYSKLTVSKE | |
| | EWQQGFVFSCSVMHEALHNHYTQKSLSLSPGK | |
| 208 | APEAAGGPSVFLFPPKPKDTLYITREPEVTCVVVDVSHEDPEVKFNW | Clone CH3C.35.23.4 with |
| | YVDGVEVHNAKTKPREEQYNSTYRVVSVLTVLHQDWLNGKEYKC | knob, LALAPG, and YTE |
| | KVSNKALGAPIEKTISKAKGQPREPQVYTLPPSRDELTKNQVSLWCL | mutations |
| | VKGFYPSDIAVEWESYGTEWSNYKTTPPVLDSDGSFFLYSKLTVSKE | |
| | EWQQGFVFSCSVMHEALHNHYTQKSLSLSPGK | |
| 209 | APELLGGPSVFLFPPKPKDTLMISRTPEVTCVVVDVSHEDPEVKFNW | Clone CH3C.35.23.4 with |
| | YVDGVEVHNAKTKPREEQYNSTYRVVSVLTVLHQDWLNGKEYKC | hole mutations |
| | KVSNKALPAPIEKTISKAKGQPREPQVYTLPPSRDELTKNQVSLSCA | |
| | VKGFYPSDIAVEWESYGTEWSNYKTTPPVLDSDGSFFLVSKLTVSKE | |
| | EWQQGFVFSCSVMHEALHNHYTQKSLSLSPGK | |
| 210 | APEAAGGPSVFLFPPKPKDTLMISRTPEVTCVVVDVSHEDPEVKFNW | Clone CH3C.35.23.4 with |
| | YVDGVEVHNAKTKPREEQYNSTYRVVSVLTVLHQDWLNGKEYKC | hole and LALA mutations |
| | KVSNKALPAPIEKTISKAKGQPREPQVYTLPPSRDELTKNQVSLSCA | |
| | VKGFYPSDIAVEWESYGTEWSNYKTTPPVLDSDGSFFLVSKLTVSKE | |
| | EWQQGFVFSCSVMHEALHNHYTQKSLSLSPGK | |
| 211 | APEAAGGPSVFLFPPKPKDTLMISRTPEVTCVVVDVSHEDPEVKFNW | Clone CH3C.35.23.4 with |
| | YVDGVEVHNAKTKPREEQYNSTYRVVSVLTVLHQDWLNGKEYKC | hole and LALAPG |
| | KVSNKALGAPIEKTISKAKGQPREPQVYTLPPSRDELTKNQVSLSCA | mutations |
| | VKGFYPSDIAVEWESYGTEWSNYKTTPPVLDSDGSFFLVSKLTVSKE | |
| | EWQQGFVFSCSVMHEALHNHYTQKSLSLSPGK | |
| 212 | APELLGGPSVFLFPPKPKDTLYITREPEVTCVVVDVSHEDPEVKFNW | Clone CH3C.35.23.4 with |
| | YVDGVEVHNAKTKPREEQYNSTYRVVSVLTVLHQDWLNGKEYKC | hole and YTE mutations |
| | KVSNKALPAPIEKTISKAKGQPREPQVYTLPPSRDELTKNQVSLSCA | |
| | VKGFYPSDIAVEWESYGTEWSNYKTTPPVLDSDGSFFLVSKLTVSKE | |
| | EWQQGFVFSCSVMHEALHNHYTQKSLSLSPGK | |
| 213 | APEAAGGPSVFLFPPKPKDTLYITREPEVTCVVVDVSHEDPEVKFNW | Clone CH3C.35.23.4 with |
| | YVDGVEVHNAKTKPREEQYNSTYRVVSVLTVLHQDWLNGKEYKC | hole, LALA, and YTE |
| | KVSNKALPAPIEKTISKAKGQPREPQVYTLPPSRDELTKNQVSLSCA | mutations |
| | VKGFYPSDIAVEWESYGTEWSNYKTTPPVLDSDGSFFLVSKLTVSKE | |
| | EWQQGFVFSCSVMHEALHNHYTQKSLSLSPGK | |
| 214 | APEAAGGPSVFLFPPKPKDTLYITREPEVTCVVVDVSHEDPEVKFNW | Clone CH3C.35.23.4 with |
| | YVDGVEVHNAKTKPREEQYNSTYRVVSVLTVLHQDWLNGKEYKC | hole, LALAPG, and YTE |
| | KVSNKALGAPIEKTISKAKGQPREPQVYTLPPSRDELTKNQVSLSCA | mutations |
| | VKGFYPSDIAVEWESYGTEWSNYKTTPPVLDSDGSFFLVSKLTVSKE | |
| | EWQQGFVFSCSVMHEALHNHYTQKSLSLSPGK | |
| 215 | APELLGGPSVFLFPPKPKDTLMISRTPEVTCVVVDVSHEDPEVKFNW | Clone CH3C.35.21.17.2 |
| | YVDGVEVHNAKTKPREEQYNSTYRVVSVLTVLHQDWLNGKEYKC | with knob mutation |
| | KVSNKALPAPIEKTISKAKGQPREPQVYTLPPSRDELTKNQVSLWCL | |
| | VKGFYPSDIAVLWESYGTEWASYKTTPPVLDSDGSFFLYSKLTVTKE | |
| | EWQQGFVFSCSVMHEALHNHYTQKSLSLSPGK | |
| 216 | APEAAGGPSVFLFPPKPKDTLMISRTPEVTCVVVDVSHEDPEVKFNW | Clone CH3C.35.21.17.2 |
| | YVDGVEVHNAKTKPREEQYNSTYRVVSVLTVLHQDWLNGKEYKC | with knob and LALA |
| | KVSNKALPAPIEKTISKAKGQPREPQVYTLPPSRDELTKNQVSLWCL | mutations |
| | VKGFYPSDIAVLWESYGTEWASYKTTPPVLDSDGSFFLYSKLTVTKE | |
| | EWQQGFVFSCSVMHEALHNHYTQKSLSLSPGK | |
| 217 | APEAAGGPSVFLFPPKPKDTLMISRTPEVTCVVVDVSHEDPEVKFNW | Clone CH3C.35.21.17.2 |
| | YVDGVEVHNAKTKPREEQYNSTYRVVSVLTVLHQDWLNGKEYKC | with knob and LALAPG |
| | KVSNKALGAPIEKTISKAKGQPREPQVYTLPPSRDELTKNQVSLWCL | mutations |
| | VKGFYPSDIAVLWESYGTEWASYKTTPPVLDSDGSFFLYSKLTVTKE | |
| | EWQQGFVFSCSVMHEALHNHYTQKSLSLSPGK | |
| 218 | APELLGGPSVFLFPPKPKDTLYITREPEVTCVVVDVSHEDPEVKFNW | Clone CH3C.35.21.17.2 |
| | YVDGVEVHNAKTKPREEQYNSTYRVVSVLTVLHQDWLNGKEYKC | with knob and YTE |
| | KVSNKALPAPIEKTISKAKGQPREPQVYTLPPSRDELTKNQVSLWCL | mutations |
| | VKGFYPSDIAVLWESYGTEWASYKTTPPVLDSDGSFFLYSKLTVTKE | |
| | EWQQGFVFSCSVMHEALHNHYTQKSLSLSPGK | |
| 219 | APEAAGGPSVFLFPPKPKDTLYITREPEVTCVVVDVSHEDPEVKFNW | Clone CH3C.35.21.17.2 |
| | YVDGVEVHNAKTKPREEQYNSTYRVVSVLTVLHQDWLNGKEYKC | with knob, LALA, and |
| | KVSNKALPAPIEKTISKAKGQPREPQVYTLPPSRDELTKNQVSLWCL | YTE mutations |
| | VKGFYPSDIAVLWESYGTEWASYKTTPPVLDSDGSFFLYSKLTVTKE | |
| | EWQQGFVFSCSVMHEALHNHYTQKSLSLSPGK | |
| 220 | APEAAGGPSVFLFPPKPKDTLYITREPEVTCVVVDVSHEDPEVKFNW | Clone CH3C.35.21.17.2 |
| | YVDGVEVHNAKTKPREEQYNSTYRVVSVLTVLHQDWLNGKEYKC | with knob, LALAPG, and |
| | KVSNKALGAPIEKTISKAKGQPREPQVYTLPPSRDELTKNQVSLWCL | YTE mutations |
| | VKGFYPSDIAVLWESYGTEWASYKTTPPVLDSDGSFFLYSKLTVTKE | |
| | EWQQGFVFSCSVMHEALHNHYTQKSLSLSPGK | |
| 221 | APELLGGPSVFLFPPKPKDTLMISRTPEVTCVVVDVSHEDPEVKFNW | Clone CH3C.35.21.17.2 |
| | YVDGVEVHNAKTKPREEQYNSTYRVVSVLTVLHQDWLNGKEYKC | with hole mutations |
| | KVSNKALPAPIEKTISKAKGQPREPQVYTLPPSRDELTKNQVSLSCA | |
| | VKGFYPSDIAVLWESYGTEWASYKTTPPVLDSDGSFFLVSKLTVTKE | |
| | EWQQGFVFSCSVMHEALHNHYTQKSLSLSPGK | |
| 222 | APEAAGGPSVFLFPPKPKDTLMISRTPEVTCVVVDVSHEDPEVKFNW | Clone CH3C.35.21.17.2 |
| | YVDGVEVHNAKTKPREEQYNSTYRVVSVLTVLHQDWLNGKEYKC | with hole and LALA |
| | KVSNKALPAPIEKTISKAKGQPREPQVYTLPPSRDELTKNQVSLSCA | mutations |
| | VKGFYPSDIAVLWESYGTEWASYKTTPPVLDSDGSFFLVSKLTVTKE | |
| | EWQQGFVFSCSVMHEALHNHYTQKSLSLSPGK | |
| 223 | APEAAGGPSVFLFPPKPKDTLMISRTPEVTCVVVDVSHEDPEVKFNW | Clone CH3C.35.21.17.2 |
| | YVDGVEVHNAKTKPREEQYNSTYRVVSVLTVLHQDWLNGKEYKC | with hole and LALAPG |
| | KVSNKALGAPIEKTISKAKGQPREPQVYTLPPSRDELTKNQVSLSCA | mutations |
| | VKGFYPSDIAVLWESYGTEWASYKTTPPVLDSDGSFFLVSKLTVTKE | |
| | EWQQGFVFSCSVMHEALHNHYTQKSLSLSPGK | |
| 224 | APELLGGPSVFLFPPKPKDTLYITREPEVTCVVVDVSHEDPEVKFNW | Clone CH3C.35.21.17.2 |
| | YVDGVEVHNAKTKPREEQYNSTYRVVSVLTVLHQDWLNGKEYKC | with hole and YTE |
| | KVSNKALPAPIEKTISKAKGQPREPQVYTLPPSRDELTKNQVSLSCA | mutations |
| | VKGFYPSDIAVLWESYGTEWASYKTTPPVLDSDGSFFLVSKLTVTKE | |
| | EWQQGFVFSCSVMHEALHNHYTQKSLSLSPGK | |
| 225 | APEAAGGPSVFLFPPKPKDTLYITREPEVTCVVVDVSHEDPEVKFNW | Clone CH3C.35.21.17.2 |
| | YVDGVEVHNAKTKPREEQYNSTYRVVSVLTVLHQDWLNGKEYKC | with hole, LALA, and |
| | KVSNKALPAPIEKTISKAKGQPREPQVYTLPPSRDELTKNQVSLSCA | YTE mutations |
| | VKGFYPSDIAVLWESYGTEWASYKTTPPVLDSDGSFFLVSKLTVTKE | |
| | EWQQGFVFSCSVMHEALHNHYTQKSLSLSPGK | |
| 226 | APEAAGGPSVFLFPPKPKDTLYITREPEVTCVVVDVSHEDPEVKFNW | Clone CH3C.35.21.17.2 |
| | YVDGVEVHNAKTKPREEQYNSTYRVVSVLTVLHQDWLNGKEYKC | with hole, LALAPG, and |
| | KVSNKALGAPIEKTISKAKGQPREPQVYTLPPSRDELTKNQVSLSCA | YTE mutations |
| | VKGFYPSDIAVLWESYGTEWASYKTTPPVLDSDGSFFLVSKLTVTKE | |
| | EWQQGFVFSCSVMHEALHNHYTQKSLSLSPGK | |
| 227 | APELLGGPSVFLFPPKPKDTLMISRTPEVTCVVVDVSHEDPEVKFNW | Clone CH3C.35.23 with |
| | YVDGVEVHNAKTKPREEQYNSTYRVVSVLTVLHQDWLNGKEYKC | knob mutation |
| | KVSNKALPAPIEKTISKAKGQPREPQVYTLPPSRDELTKNQVSLWCL | |
| | VKGFYPSDIAVEWESYGTEWSNYKTTPPVLDSDGSFFLYSKLTVTKE | |
| | EWQQGFVFSCSVMHEALHNHYTQKSLSLSPGK | |
| 228 | APEAAGGPSVFLFPPKPKDTLMISRTPEVTCVVVDVSHEDPEVKFNW | Clone CH3C.35.23 with |
| | YVDGVEVHNAKTKPREEQYNSTYRVVSVLTVLHQDWLNGKEYKC | knob and LALA mutations |
| | KVSNKALPAPIEKTISKAKGQPREPQVYTLPPSRDELTKNQVSLWCL | |
| | VKGFYPSDIAVEWESYGTEWSNYKTTPPVLDSDGSFFLYSKLTVTKE | |
| | EWQQGFVFSCSVMHEALHNHYTQKSLSLSPGK | |
| 229 | APEAAGGPSVFLFPPKPKDTLMISRTPEVTCVVVDVSHEDPEVKFNW | Clone CH3C.35.23 with |
| | YVDGVEVHNAKTKPREEQYNSTYRVVSVLTVLHQDWLNGKEYKC | knob and LALAPG |
| | KVSNKALGAPIEKTISKAKGQPREPQVYTLPPSRDELTKNQVSLWCL | mutations |
| | VKGFYPSDIAVEWESYGTEWSNYKTTPPVLDSDGSFFLYSKLTVTKE | |
| | EWQQGFVFSCSVMHEALHNHYTQKSLSLSPGK | |
| 230 | APELLGGPSVFLFPPKPKDTLYITREPEVTCVVVDVSHEDPEVKFNW | Clone CH3C.35.23 with |
| | YVDGVEVHNAKTKPREEQYNSTYRVVSVLTVLHQDWLNGKEYKC | knob and YTE mutations |
| | KVSNKALPAPIEKTISKAKGQPREPQVYTLPPSRDELTKNQVSLWCL | |
| | VKGFYPSDIAVEWESYGTEWSNYKTTPPVLDSDGSFFLYSKLTVTKE | |
| | EWQQGFVFSCSVMHEALHNHYTQKSLSLSPGK | |
| 231 | APEAAGGPSVFLFPPKPKDTLYITREPEVTCVVVDVSHEDPEVKFNW | Clone CH3C.35.23 with |
| | YVDGVEVHNAKTKPREEQYNSTYRVVSVLTVLHQDWLNGKEYKC | knob, LALA, and YTE |
| | KVSNKALPAPIEKTISKAKGQPREPQVYTLPPSRDELTKNQVSLWCL | mutations |
| | VKGFYPSDIAVEWESYGTEWSNYKTTPPVLDSDGSFFLYSKLTVTKE | |
| | EWQQGFVFSCSVMHEALHNHYTQKSLSLSPGK | |
| 232 | APEAAGGPSVFLFPPKPKDTLYITREPEVTCVVVDVSHEDPEVKFNW | Clone CH3C.35.23 with |
| | YVDGVEVHNAKTKPREEQYNSTYRVVSVLTVLHQDWLNGKEYKC | knob, LALAPG, and YTE |
| | KVSNKALGAPIEKTISKAKGQPREPQVYTLPPSRDELTKNQVSLWCL | mutations |
| | VKGFYPSDIAVEWESYGTEWSNYKTTPPVLDSDGSFFLYSKLTVTKE | |
| | EWQQGFVFSCSVMHEALHNHYTQKSLSLSPGK | |
| 233 | APELLGGPSVFLFPPKPKDTLMISRTPEVTCVVVDVSHEDPEVKFNW | Clone CH3C.35.23 with |
| | YVDGVEVHNAKTKPREEQYNSTYRVVSVLTVLHQDWLNGKEYKC | hole mutations |
| | KVSNKALPAPIEKTISKAKGQPREPQVYTLPPSRDELTKNQVSLSCA | |
| | VKGFYPSDIAVEWESYGTEWSNYKTTPPVLDSDGSFFLVSKLTVTKE | |
| | EWQQGFVFSCSVMHEALHNHYTQKSLSLSPGK | |
| 234 | APEAAGGPSVFLFPPKPKDTLMISRTPEVTCVVVDVSHEDPEVKFNW | Clone CH3C.35.23 with |
| | YVDGVEVHNAKTKPREEQYNSTYRVVSVLTVLHQDWLNGKEYKC | hole and LALA mutations |
| | KVSNKALPAPIEKTISKAKGQPREPQVYTLPPSRDELTKNQVSLSCA | |
| | VKGFYPSDIAVEWESYGTEWSNYKTTPPVLDSDGSFFLVSKLTVTKE | |
| | EWQQGFVFSCSVMHEALHNHYTQKSLSLSPGK | |
| 235 | APEAAGGPSVFLFPPKPKDTLMISRTPEVTCVVVDVSHEDPEVKFNW | Clone CH3C.35.23 with |
| | YVDGVEVHNAKTKPREEQYNSTYRVVSVLTVLHQDWLNGKEYKC | hole and LALAPG |
| | KVSNKALGAPIEKTISKAKGQPREPQVYTLPPSRDELTKNQVSLSCA | mutations |
| | VKGFYPSDIAVEWESYGTEWSNYKTTPPVLDSDGSFFLVSKLTVTKE | |
| | EWQQGFVFSCSVMHEALHNHYTQKSLSLSPGK | |
| 236 | APELLGGPSVFLFPPKPKDTLYITREPEVTCVVVDVSHEDPEVKFNW | Clone CH3C.35.23 with |
| | YVDGVEVHNAKTKPREEQYNSTYRVVSVLTVLHQDWLNGKEYKC | hole and YTE mutations |
| | KVSNKALPAPIEKTISKAKGQPREPQVYTLPPSRDELTKNQVSLSCA | |
| | VKGFYPSDIAVEWESYGTEWSNYKTTPPVLDSDGSFFLVSKLTVTKE | |
| | EWQQGFVFSCSVMHEALHNHYTQKSLSLSPGK | |
| 237 | APEAAGGPSVFLFPPKPKDTLYITREPEVTCVVVDVSHEDPEVKFNW | Clone CH3C.35.23 with |
| | YVDGVEVHNAKTKPREEQYNSTYRVVSVLTVLHQDWLNGKEYKC | hole, LALA, and YTE |
| | KVSNKALPAPIEKTISKAKGQPREPQVYTLPPSRDELTKNQVSLSCA | mutations |
| | VKGFYPSDIAVEWESYGTEWSNYKTTPPVLDSDGSFFLVSKLTVTKE | |
| | EWQQGFVFSCSVMHEALHNHYTQKSLSLSPGK | |
| 238 | APEAAGGPSVFLFPPKPKDTLYITREPEVTCVVVDVSHEDPEVKFNW | Clone CH3C.35.23 with |
| | YVDGVEVHNAKTKPREEQYNSTYRVVSVLTVLHQDWLNGKEYKC | hole, LALAPG, and YTE |
| | KVSNKALGAPIEKTISKAKGQPREPQVYTLPPSRDELTKNQVSLSCA | mutations |
| | VKGFYPSDIAVEWESYGTEWSNYKTTPPVLDSDGSFFLVSKLTVTKE | |
| | EWQQGFVFSCSVMHEALHNHYTQKSLSLSPGK | |
| 239 | APELLGGPSVFLFPPKPKDTLMISRTPEVTCVVVDVSHEDPEVKFNW | Clone CH3C.18.3.4-1 |
| | YVDGVEVHNAKTKPREEQYNSTYRVVSVLTVLHQDWLNGKEYKC | (CH3C.3.4-1) |
| | KVSNKALPAPIEKTISKAKGQPREPQVYTLPPSRDELTKNQVSLTCL | |
| | VKGFYPSDIAVEWESWGFVWSTYKTTPPVLDSDGSFFLYSKLTVPK | |
| | SNWQQGFVFSCSVMHEALHNHYTQKSLSLSPGK | |
| 240 | APELLGGPSVFLFPPKPKDTLMISRTPEVTCVVVDVSHEDPEVKFNW | Clone CH3C.18.3.4-19 |
| | YVDGVEVHNAKTKPREEQYNSTYRVVSVLTVLHQDWLNGKEYKC | (CH3C.3.4-19) |
| | KVSNKALPAPIEKTISKAKGQPREPQVYTLPPSRDELTKNQVSLTCL | |
| | VKGFYPSDIAVEWESWGHVWSTYKTTPPVLDSDGSFFLYSKLTVPK | |
| | SNWQQGYVFSCSVMHEALHNHYTQKSLSLSPGK | |
| 241 | APELLGGPSVFLFPPKPKDTLMISRTPEVTCVVVDVSHEDPEVKFNW | Clone CH3C.18.3.2-3 |
| | YVDGVEVHNAKTKPREEQYNSTYRVVSVLTVLHQDWLNGKEYKC | (CH3C.3.2-3) |
| | KVSNKALPAPIEKTISKAKGQPREPQVYTLPPSRDELTKNQVSLTCL | |
| | VKGFYPSDIAVEWESLGHVWVEQKTTPPVLDSDGSFFLYSKLTVPK | |
| | STWQQGWVFSCSVMHEALHNHYTQKSLSLSPGK | |
| 242 | APELLGGPSVFLFPPKPKDTLMISRTPEVTCVVVDVSHEDPEVKFNW | Clone CH3C.18.3.2-14 |
| | YVDGVEVHNAKTKPREEQYNSTYRVVSVLTVLHQDWLNGKEYKC | (CH3C.3.2-14) |
| | KVSNKALPAPIEKTISKAKGQPREPQVYTLPPSRDELTKNQVSLTCL | |
| | VKGFYPSDIAVEWESLGHVWVGVKTTPPVLDSDGSFFLYSKLTVPK | |
| | STWQQGWVFSCSVMHEALHNHYTQKSLSLSPGK | |
| 243 | APELLGGPSVFLFPPKPKDTLMISRTPEVTCVVVDVSHEDPEVKFNW | Clone CH3.18.3.2-24 |
| | YVDGVEVHNAKTKPREEQYNSTYRVVSVLTVLHQDWLNGKEYKC | (CH3C.3.2-24) |
| | KVSNKALPAPIEKTISKAKGQPREPQVYTLPPSRDELTKNQVSLTCL | |
| | VKGFYPSDIAVEWESLGHVWVHTKTTPPVLDSDGSFFLYSKLTVPK | |
| | STWQQGWVFSCSVMHEALHNHYTQKSLSLSPGK | |
| 244 | APELLGGPSVFLFPPKPKDTLMISRTPEVTCVVVDVSHEDPEVKFNW | Clone CH3C.18.3.4-26 |
| | YVDGVEVHNAKTKPREEQYNSTYRVVSVLTVLHQDWLNGKEYKC | (CH3C.4.4-26) |
| | KVSNKALPAPIEKTISKAKGQPREPQVYTLPPSRDELTKNQVSLTCL | |
| | VKGFYPSDIAVEWESWGTVWGTYKTTPPVLDSDGSFFLYSKLTVPK | |
| | SNWQQGYVFSCSVMHEALHNHYTQKSLSLSPGK | |
| 245 | APELLGGPSVFLFPPKPKDTLMISRTPEVTCVVVDVSHEDPEVKFNW | Clone CH3C.18.3.2-17 |
| | YVDGVEVHNAKTKPREEQYNSTYRVVSVLTVLHQDWLNGKEYKC | (CH3C.3.2-17) |
| | KVSNKALPAPIEKTISKAKGQPREPQVYTLPPSRDELTKNQVSLTCL | |
| | VKGFYPSDIAVEWESLGHVWVGTKTTPPVLDSDGSFFLYSKLTVPK | |
| | STWQQGWVFSCSVMHEALHNHYTQKSLSLSPGK | |
| 246 | APELLGGPSVFLFPPKPKDTLMISRTPEVTCVVVDVSHEDPEVKFNW | Clone CH3C.35.20.1.1 |
| | YVDGVEVHNAKTKPREEQYNSTYRVVSVLTVLHQDWLNGKEYKC | |
| | KVSNKALPAPIEKTISKAKGQPREPQVYTLPPSRDELTKNQVSLTCL | |
| | VKGFYPSDIAVEWESFGTEWSSYKTTPPVLDSDGSFFLYSKLTVSKE | |
| | EWQQGFVFSCSVMHEALHNHYTQKSLSLSPGK | |
| 247 | APELLGGPSVFLFPPKPKDTLMISRTPEVTCVVVDVSHEDPEVKFNW | Clone CH3C.35.23.2.1 |
| | YVDGVEVHNAKTKPREEQYNSTYRVVSVLTVLHQDWLNGKEYKC | |
| | KVSNKALPAPIEKTISKAKGQPREPQVYTLPPSRDELTKNQVSLTCL | |
| | VKGFYPSDIAVEWESYGTEWANYKTTPPVLDSDGSFFLYSKLTVSK | |
| | SEWQQGFVFSCSVMHEALHNHYTQKSLSLSPGK | |
| 248 | APELLGGPSVFLFPPKPKDTLMISRTPEVTCVVVDVSHEDPEVKFNW | Clone CH3C.35.23.1.1 |
| | YVDGVEVHNAKTKPREEQYNSTYRVVSVLTVLHQDWLNGKEYKC | |
| | KVSNKALPAPIEKTISKAKGQPREPQVYTLPPSRDELTKNQVSLTCL | |
| | VKGFYPSDIAVEWESFGTEWSNYKTTPPVLDSDGSFFLYSKLTVSKE | |
| | EWQQGFVFSCSVMHEALHNHYTQKSLSLSPGK | |
| 249 | APELLGGPSVFLFPPKPKDTLMISRTPEVTCVVVDVSHEDPEVKFNW | Clone CH3C.35.S413 |
| | YVDGVEVHNAKTKPREEQYNSTYRVVSVLTVLHQDWLNGKEYKC | |
| | KVSNKALPAPIEKTISKAKGQPREPQVYTLPPSRDELTKNQVSLTCL | |
| | VKGFYPSDIAVEWESYGTEWSSYKTTPPVLDSDGSFFLYSKLTVSKS | |
| | EWQQGFVFSCSVMHEALHNHYTQKSLSLSPGK | |
| 250 | APELLGGPSVFLFPPKPKDTLMISRTPEVTCVVVDVSHEDPEVKFNW | Clone CH3C.35.23.3.1 |
| | YVDGVEVHNAKTKPREEQYNSTYRVVSVLTVLHQDWLNGKEYKC | |
| | KVSNKALPAPIEKTISKAKGQPREPQVYTLPPSRDELTKNQVSLTCL | |
| | VKGFYPSDIAVEWESYGTEWVNYKTTPPVLDSDGSFFLYSKLTVSK | |
| | EEWQQGFVFSCSVMHEALHNHYTQKSLSLSPGK | |
| 251 | APELLGGPSVFLFPPKPKDTLMISRTPEVTCVVVDVSHEDPEVKFNW | Clone CH3C.35.N390.1 |
| | YVDGVEVHNAKTKPREEQYNSTYRVVSVLTVLHQDWLNGKEYKC | |
| | KVSNKALPAPIEKTISKAKGQPREPQVYTLPPSRDELTKNQVSLTCL | |
| | VKGFYPSDIAVEWESYGTEWSNYKTTPPVLDSDGSFFLYSKLTVSKS | |
| | EWQQGFVFSCSVMHEALHNHYTQKSLSLSPGK | |
| 252 | APELLGGPSVFLFPPKPKDTLMISRTPEVTCVVVDVSHEDPEVKFNW | Clone CH3C.35.23.6.1 |
| | YVDGVEVHNAKTKPREEQYNSTYRVVSVLTVLHQDWLNGKEYKC | |
| | KVSNKALPAPIEKTISKAKGQPREPQVYTLPPSRDELTKNQVSLTCL | |
| | VKGFYPSDIAVEWESFGTEWVNYKTTPPVLDSDGSFFLYSKLTVSKE | |
| | EWQQGFVFSCSVMHEALHNHYTQKSLSLSPGK | |
| 253 | APELLGGPSVFLFPPKPKDTLMISRTPEVTCVVVDVSHEDPEVKFNW | Clone CH3C.35.21 with |
| | YVDGVEVHNAKTKPREEQYNSTYRVVSVLTVLHQDWLNGKEYKC | knob mutation |
| | KVSNKALPAPIEKTISKAKGQPREPQVYTLPPSRDELTKNQVSLWCL | |
| | VKGFYPSDIAVWWESYGTEWSSYKTTPPVLDSDGSFFLYSKLTVTK | |
| | EEWQQGFVFSCSVMHEALHNHYTQKSLSLSPGK | |
| 254 | APEAAGGPSVFLFPPKPKDTLMISRTPEVTCVVVDVSHEDPEVKFNW | Clone CH3C.35.21 with |
| | YVDGVEVHNAKTKPREEQYNSTYRVVSVLTVLHQDWLNGKEYKC | knob and LALA mutations |
| | KVSNKALPAPIEKTISKAKGQPREPQVYTLPPSRDELTKNQVSLWCL | |
| | VKGFYPSDIAVWWESYGTEWSSYKTTPPVLDSDGSFFLYSKLTVTK | |
| | EEWQQGFVFSCSVMHEALHNHYTQKSLSLSPGK | |
| 255 | APEAAGGPSVFLFPPKPKDTLMISRTPEVTCVVVDVSHEDPEVKFNW | Clone CH3C.35.21 with |
| | YVDGVEVHNAKTKPREEQYNSTYRVVSVLTVLHQDWLNGKEYKC | knob and LALAPG |
| | KVSNKALGAPIEKTISKAKGQPREPQVYTLPPSRDELTKNQVSLWCL | mutations |
| | VKGFYPSDIAVWWESYGTEWSSYKTTPPVLDSDGSFFLYSKLTVTK | |
| | EEWQQGFVFSCSVMHEALHNHYTQKSLSLSPGK | |
| 256 | APELLGGPSVFLFPPKPKDTLYITREPEVTCVVVDVSHEDPEVKFNW | Clone CH3C.35.21 with |
| | YVDGVEVHNAKTKPREEQYNSTYRVVSVLTVLHQDWLNGKEYKC | knob and YTE mutations |
| | KVSNKALPAPIEKTISKAKGQPREPQVYTLPPSRDELTKNQVSLWCL | |
| | VKGFYPSDIAVWWESYGTEWSSYKTTPPVLDSDGSFFLYSKLTVTK | |
| | EEWQQGFVFSCSVMHEALHNHYTQKSLSLSPGK | |
| 257 | APEAAGGPSVFLFPPKPKDTLYITREPEVTCVVVDVSHEDPEVKFNW | Clone CH3C.35.21 with |
| | YVDGVEVHNAKTKPREEQYNSTYRVVSVLTVLHQDWLNGKEYKC | knob, LALA, and YTE |
| | KVSNKALPAPIEKTISKAKGQPREPQVYTLPPSRDELTKNQVSLWCL | mutations |
| | VKGFYPSDIAVWWESYGTEWSSYKTTPPVLDSDGSFFLYSKLTVTK | |
| | EEWQQGFVFSCSVMHEALHNHYTQKSLSLSPGK | |
| 258 | APEAAGGPSVFLFPPKPKDTLYITREPEVTCVVVDVSHEDPEVKFNW | Clone CH3C.35.21 with |
| | YVDGVEVHNAKTKPREEQYNSTYRVVSVLTVLHQDWLNGKEYKC | knob, LALAPG, and YTE |
| | KVSNKALGAPIEKTISKAKGQPREPQVYTLPPSRDELTKNQVSLWCL | mutations |
| | VKGFYPSDIAVWWESYGTEWSSYKTTPPVLDSDGSFFLYSKLTVTK | |
| | EEWQQGFVFSCSVMHEALHNHYTQKSLSLSPGK | |
| 259 | APELLGGPSVFLFPPKPKDTLMISRTPEVTCVVVDVSHEDPEVKFNW | Clone CH3C.35.21 with |
| | YVDGVEVHNAKTKPREEQYNSTYRVVSVLTVLHQDWLNGKEYKC | hole mutations |
| | KVSNKALPAPIEKTISKAKGQPREPQVYTLPPSRDELTKNQVSLSCA | |
| | VKGFYPSDIAVWWESYGTEWSSYKTTPPVLDSDGSFFLVSKLTVTK | |
| | EEWQQGFVFSCSVMHEALHNHYTQKSLSLSPGK | |
| 260 | APEAAGGPSVFLFPPKPKDTLMISRTPEVTCVVVDVSHEDPEVKFNW | Clone CH3C.35.21 with |
| | YVDGVEVHNAKTKPREEQYNSTYRVVSVLTVLHQDWLNGKEYKC | hole and LALA mutations |
| | KVSNKALPAPIEKTISKAKGQPREPQVYTLPPSRDELTKNQVSLSCA | |
| | VKGFYPSDIAVWWESYGTEWSSYKTTPPVLDSDGSFFLVSKLTVTK | |
| | EEWQQGFVFSCSVMHEALHNHYTQKSLSLSPGK | |
| 261 | APEAAGGPSVFLFPPKPKDTLMISRTPEVTCVVVDVSHEDPEVKFNW | Clone CH3C.35.21 with |
| | YVDGVEVHNAKTKPREEQYNSTYRVVSVLTVLHQDWLNGKEYKC | hole and LALAPG |
| | KVSNKALGAPIEKTISKAKGQPREPQVYTLPPSRDELTKNQVSLSCA | mutations |
| | VKGFYPSDIAVWWESYGTEWSSYKTTPPVLDSDGSFFLVSKLTVTK | |
| | EEWQQGFVFSCSVMHEALHNHYTQKSLSLSPGK | |
| 262 | APELLGGPSVFLFPPKPKDTLYITREPEVTCVVVDVSHEDPEVKFNW | Clone CH3C.35.21 with |
| | YVDGVEVHNAKTKPREEQYNSTYRVVSVLTVLHQDWLNGKEYKC | hole and YTE mutations |
| | KVSNKALPAPIEKTISKAKGQPREPQVYTLPPSRDELTKNQVSLSCA | |
| | VKGFYPSDIAVWWESYGTEWSSYKTTPPVLDSDGSFFLVSKLTVTK | |
| | EEWQQGFVFSCSVMHEALHNHYTQKSLSLSPGK | |
| 263 | APEAAGGPSVFLFPPKPKDTLYITREPEVTCVVVDVSHEDPEVKFNW | Clone CH3C.35.21 with |
| | YVDGVEVHNAKTKPREEQYNSTYRVVSVLTVLHQDWLNGKEYKC | hole, LALA, and YTE |
| | KVSNKALPAPIEKTISKAKGQPREPQVYTLPPSRDELTKNQVSLSCA | mutations |
| | VKGFYPSDIAVWWESYGTEWSSYKTTPPVLDSDGSFFLVSKLTVTK | |
| | EEWQQGFVFSCSVMHEALHNHYTQKSLSLSPGK | |
| 264 | APEAAGGPSVFLFPPKPKDTLYITREPEVTCVVVDVSHEDPEVKFNW | Clone CH3C.35.21 with |
| | YVDGVEVHNAKTKPREEQYNSTYRVVSVLTVLHQDWLNGKEYKC | hole, LALAPG, and YTE |
| | KVSNKALGAPIEKTISKAKGQPREPQVYTLPPSRDELTKNQVSLSCA | mutations |
| | VKGFYPSDIAVWWESYGTEWSSYKTTPPVLDSDGSFFLVSKLTVTK | |
| | EEWQQGFVFSCSVMHEALHNHYTQKSLSLSPGK | |
| 265 | APELLGGPSVFLFPPKPKDTLMISRTPEVTCVVVDVSHEDPEVKFNW | Clone CH3C.35.20.1.1 |
| | YVDGVEVHNAKTKPREEQYNSTYRVVSVLTVLHQDWLNGKEYKC | with knob mutation |
| | KVSNKALPAPIEKTISKAKGQPREPQVYTLPPSRDELTKNQVSLWCL | |
| | VKGFYPSDIAVEWESFGTEWSSYKTTPPVLDSDGSFFLYSKLTVSKE | |
| | EWQQGFVFSCSVMHEALHNHYTQKSLSLSPGK | |
| 266 | APEAAGGPSVFLFPPKPKDTLMISRTPEVTCVVVDVSHEDPEVKFNW | Clone CH3C.35.20.1.1 |
| | YVDGVEVHNAKTKPREEQYNSTYRVVSVLTVLHQDWLNGKEYKC | with knob and LALA |
| | KVSNKALPAPIEKTISKAKGQPREPQVYTLPPSRDELTKNQVSLWCL | mutations |
| | VKGFYPSDIAVEWESFGTEWSSYKTTPPVLDSDGSFFLYSKLTVSKE | |
| | EWQQGFVFSCSVMHEALHNHYTQKSLSLSPGK | |
| 267 | APEAAGGPSVFLFPPKPKDTLMISRTPEVTCVVVDVSHEDPEVKFNW | Clone CH3C.35.20.1.1 |
| | YVDGVEVHNAKTKPREEQYNSTYRVVSVLTVLHQDWLNGKEYKC | with knob and LALAPG |
| | KVSNKALGAPIEKTISKAKGQPREPQVYTLPPSRDELTKNQVSLWCL | mutations |
| | VKGFYPSDIAVEWESFGTEWSSYKTTPPVLDSDGSFFLYSKLTVSKE | |
| | EWQQGFVFSCSVMHEALHNHYTQKSLSLSPGK | |
| 268 | APELLGGPSVFLFPPKPKDTLYITREPEVTCVVVDVSHEDPEVKFNW | Clone CH3C.35.20.1.1 |
| | YVDGVEVHNAKTKPREEQYNSTYRVVSVLTVLHQDWLNGKEYKC | with knob and YTE |
| | KVSNKALPAPIEKTISKAKGQPREPQVYTLPPSRDELTKNQVSLWCL | mutations |
| | VKGFYPSDIAVEWESFGTEWSSYKTTPPVLDSDGSFFLYSKLTVSKE | |
| | EWQQGFVFSCSVMHEALHNHYTQKSLSLSPGK | |
| 269 | APEAAGGPSVFLFPPKPKDTLYITREPEVTCVVVDVSHEDPEVKFNW | Clone CH3C.35.20.1.1 |
| | YVDGVEVHNAKTKPREEQYNSTYRVVSVLTVLHQDWLNGKEYKC | with knob, LALA, and |
| | KVSNKALPAPIEKTISKAKGQPREPQVYTLPPSRDELTKNQVSLWCL | YTE mutations |
| | VKGFYPSDIAVEWESFGTEWSSYKTTPPVLDSDGSFFLYSKLTVSKE | |
| | EWQQGFVFSCSVMHEALHNHYTQKSLSLSPGK | |
| 270 | APEAAGGPSVFLFPPKPKDTLYITREPEVTCVVVDVSHEDPEVKFNW | Clone CH3C.35.20.1.1 |
| | YVDGVEVHNAKTKPREEQYNSTYRVVSVLTVLHQDWLNGKEYKC | with knob, LALAPG, and |
| | KVSNKALGAPIEKTISKAKGQPREPQVYTLPPSRDELTKNQVSLWCL | YTE mutations |
| | VKGFYPSDIAVEWESFGTEWSSYKTTPPVLDSDGSFFLYSKLTVSKE | |
| | EWQQGFVFSCSVMHEALHNHYTQKSLSLSPGK | |
| 271 | APELLGGPSVFLFPPKPKDTLMISRTPEVTCVVVDVSHEDPEVKFNW | Clone CH3C.35.20.1.1 |
| | YVDGVEVHNAKTKPREEQYNSTYRVVSVLTVLHQDWLNGKEYKC | with hole mutations |
| | KVSNKALPAPIEKTISKAKGQPREPQVYTLPPSRDELTKNQVSLSCA | |
| | VKGFYPSDIAVEWESFGTEWSSYKTTPPVLDSDGSFFLVSKLTVSKE | |
| | EWQQGFVFSCSVMHEALHNHYTQKSLSLSPGK | |
| 272 | APEAAGGPSVFLFPPKPKDTLMISRTPEVTCVVVDVSHEDPEVKFNW | Clone CH3C.35.20.1.1 |
| | YVDGVEVHNAKTKPREEQYNSTYRVVSVLTVLHQDWLNGKEYKC | with hole and LALA |
| | KVSNKALPAPIEKTISKAKGQPREPQVYTLPPSRDELTKNQVSLSCA | mutations |
| | VKGFYPSDIAVEWESFGTEWSSYKTTPPVLDSDGSFFLVSKLTVSKE | |
| | EWQQGFVFSCSVMHEALHNHYTQKSLSLSPGK | |
| 273 | APEAAGGPSVFLFPPKPKDTLMISRTPEVTCVVVDVSHEDPEVKFNW | Clone CH3C.35.20.1.1 |
| | YVDGVEVHNAKTKPREEQYNSTYRVVSVLTVLHQDWLNGKEYKC | with hole and LALAPG |
| | KVSNKALGAPIEKTISKAKGQPREPQVYTLPPSRDELTKNQVSLSCA | mutations |
| | VKGFYPSDIAVEWESFGTEWSSYKTTPPVLDSDGSFFLVSKLTVSKE | |
| | EWQQGFVFSCSVMHEALHNHYTQKSLSLSPGK | |
| 274 | APELLGGPSVFLFPPKPKDTLYITREPEVTCVVVDVSHEDPEVKFNW | Clone CH3C.35.20.1.1 |
| | YVDGVEVHNAKTKPREEQYNSTYRVVSVLTVLHQDWLNGKEYKC | with hole and YTE |
| | KVSNKALPAPIEKTISKAKGQPREPQVYTLPPSRDELTKNQVSLSCA | mutations |
| | VKGFYPSDIAVEWESFGTEWSSYKTTPPVLDSDGSFFLVSKLTVSKE | |
| | EWQQGFVFSCSVMHEALHNHYTQKSLSLSPGK | |
| 275 | APEAAGGPSVFLFPPKPKDTLYITREPEVTCVVVDVSHEDPEVKFNW | Clone CH3C.35.20.1.1 |
| | YVDGVEVHNAKTKPREEQYNSTYRVVSVLTVLHQDWLNGKEYKC | with hole, LALA, and |
| | KVSNKALPAPIEKTISKAKGQPREPQVYTLPPSRDELTKNQVSLSCA | YTE mutations |
| | VKGFYPSDIAVEWESFGTEWSSYKTTPPVLDSDGSFFLVSKLTVSKE | |
| | EWQQGFVFSCSVMHEALHNHYTQKSLSLSPGK | |
| 276 | APEAAGGPSVFLFPPKPKDTLYITREPEVTCVVVDVSHEDPEVKFNW | Clone CH3C.35.20.1.1 |
| | YVDGVEVHNAKTKPREEQYNSTYRVVSVLTVLHQDWLNGKEYKC | with hole, LALAPG, and |
| | KVSNKALGAPIEKTISKAKGQPREPQVYTLPPSRDELTKNQVSLSCA | YTE mutations |
| | VKGFYPSDIAVEWESFGTEWSSYKTTPPVLDSDGSFFLVSKLTVSKE | |
| | EWQQGFVFSCSVMHEALHNHYTQKSLSLSPGK | |
| 277 | APELLGGPSVFLFPPKPKDTLMISRTPEVTCVVVDVSHEDPEVKFNW | Clone CH3C.35.23.2.1 |
| | YVDGVEVHNAKTKPREEQYNSTYRVVSVLTVLHQDWLNGKEYKC | with knob mutation |
| | KVSNKALPAPIEKTISKAKGQPREPQVYTLPPSRDELTKNQVSLWCL | |
| | VKGFYPSDIAVEWESYGTEWANYKTTPPVLDSDGSFFLYSKLTVSK | |
| | SEWQQGFVFSCSVMHEALHNHYTQKSLSLSPGK | |
| 278 | APEAAGGPSVFLFPPKPKDTLMISRTPEVTCVVVDVSHEDPEVKFNW | Clone CH3C.35.23.2.1 |
| | YVDGVEVHNAKTKPREEQYNSTYRVVSVLTVLHQDWLNGKEYKC | with knob and LALA |
| | KVSNKALPAPIEKTISKAKGQPREPQVYTLPPSRDELTKNQVSLWCL | mutations |
| | VKGFYPSDIAVEWESYGTEWANYKTTPPVLDSDGSFFLYSKLTVSK | |
| | SEWQQGFVFSCSVMHEALHNHYTQKSLSLSPGK | |
| 279 | APEAAGGPSVFLFPPKPKDTLMISRTPEVTCVVVDVSHEDPEVKFNW | Clone CH3C.35.23.2.1 |
| | YVDGVEVHNAKTKPREEQYNSTYRVVSVLTVLHQDWLNGKEYKC | with knob and LALAPG |
| | KVSNKALGAPIEKTISKAKGQPREPQVYTLPPSRDELTKNQVSLWCL | mutations |
| | VKGFYPSDIAVEWESYGTEWANYKTTPPVLDSDGSFFLYSKLTVSK | |
| | SEWQQGFVFSCSVMHEALHNHYTQKSLSLSPGK | |
| 280 | APELLGGPSVFLFPPKPKDTLYITREPEVTCVVVDVSHEDPEVKFNW | Clone CH3C.35.23.2.1 |
| | YVDGVEVHNAKTKPREEQYNSTYRVVSVLTVLHQDWLNGKEYKC | with knob and YTE |
| | KVSNKALPAPIEKTISKAKGQPREPQVYTLPPSRDELTKNQVSLWCL | mutations |
| | VKGFYPSDIAVEWESYGTEWANYKTTPPVLDSDGSFFLYSKLTVSK | |
| | SEWQQGFVFSCSVMHEALHNHYTQKSLSLSPGK | |
| 281 | APEAAGGPSVFLFPPKPKDTLYITREPEVTCVVVDVSHEDPEVKFNW | Clone CH3C.35.23.2.1 |
| | YVDGVEVHNAKTKPREEQYNSTYRVVSVLTVLHQDWLNGKEYKC | with knob, LALA, and |
| | KVSNKALPAPIEKTISKAKGQPREPQVYTLPPSRDELTKNQVSLWCL | YTE mutations |
| | VKGFYPSDIAVEWESYGTEWANYKTTPPVLDSDGSFFLYSKLTVSK | |
| | SEWQQGFVFSCSVMHEALHNHYTQKSLSLSPGK | |
| 282 | APEAAGGPSVFLFPPKPKDTLYITREPEVTCVVVDVSHEDPEVKFNW | Clone CH3C.35.23.2.1 |
| | YVDGVEVHNAKTKPREEQYNSTYRVVSVLTVLHQDWLNGKEYKC | with knob, LALAPG, and |
| | KVSNKALGAPIEKTISKAKGQPREPQVYTLPPSRDELTKNQVSLWCL | YTE mutations |
| | VKGFYPSDIAVEWESYGTEWANYKTTPPVLDSDGSFFLYSKLTVSK | |
| | SEWQQGFVFSCSVMHEALHNHYTQKSLSLSPGK | |
| 283 | APELLGGPSVFLFPPKPKDTLMISRTPEVTCVVVDVSHEDPEVKFNW | Clone CH3C.35.23.2.1 |
| | YVDGVEVHNAKTKPREEQYNSTYRVVSVLTVLHQDWLNGKEYKC | with hole mutations |
| | KVSNKALPAPIEKTISKAKGQPREPQVYTLPPSRDELTKNQVSLSCA | |
| | VKGFYPSDIAVEWESYGTEWANYKTTPPVLDSDGSFFLVSKLTVSK | |
| | SEWQQGFVFSCSVMHEALHNHYTQKSLSLSPGK | |
| 284 | APEAAGGPSVFLFPPKPKDTLMISRTPEVTCVVVDVSHEDPEVKFNW | Clone CH3C.35.23.2.1 |
| | YVDGVEVHNAKTKPREEQYNSTYRVVSVLTVLHQDWLNGKEYKC | with hole and LALA |
| | KVSNKALPAPIEKTISKAKGQPREPQVYTLPPSRDELTKNQVSLSCA | mutations |
| | VKGFYPSDIAVEWESYGTEWANYKTTPPVLDSDGSFFLVSKLTVSK | |
| | SEWQQGFVFSCSVMHEALHNHYTQKSLSLSPGK | |
| 285 | APEAAGGPSVFLFPPKPKDTLMISRTPEVTCVVVDVSHEDPEVKFNW | Clone CH3C.35.23.2.1 |
| | YVDGVEVHNAKTKPREEQYNSTYRVVSVLTVLHQDWLNGKEYKC | with hole and LALAPG |
| | KVSNKALGAPIEKTISKAKGQPREPQVYTLPPSRDELTKNQVSLSCA | mutations |
| | VKGFYPSDIAVEWESYGTEWANYKTTPPVLDSDGSFFLVSKLTVSK | |
| | SEWQQGFVFSCSVMHEALHNHYTQKSLSLSPGK | |
| 286 | APELLGGPSVFLFPPKPKDTLYITREPEVTCVVVDVSHEDPEVKFNW | Clone CH3C.35.23.2.1 |
| | YVDGVEVHNAKTKPREEQYNSTYRVVSVLTVLHQDWLNGKEYKC | with hole and YTE |
| | KVSNKALPAPIEKTISKAKGQPREPQVYTLPPSRDELTKNQVSLSCA | mutations |
| | VKGFYPSDIAVEWESYGTEWANYKTTPPVLDSDGSFFLVSKLTVSK | |
| | SEWQQGFVFSCSVMHEALHNHYTQKSLSLSPGK | |
| 287 | APEAAGGPSVFLFPPKPKDTLYITREPEVTCVVVDVSHEDPEVKFNW | Clone CH3C.35.23.2.1 |
| | YVDGVEVHNAKTKPREEQYNSTYRVVSVLTVLHQDWLNGKEYKC | with hole, LALA, and |
| | KVSNKALPAPIEKTISKAKGQPREPQVYTLPPSRDELTKNQVSLSCA | YTE mutations |
| | VKGFYPSDIAVEWESYGTEWANYKTTPPVLDSDGSFFLVSKLTVSK | |
| | SEWQQGFVFSCSVMHEALHNHYTQKSLSLSPGK | |
| 288 | APEAAGGPSVFLFPPKPKDTLYITREPEVTCVVVDVSHEDPEVKFNW | Clone CH3C.35.23.2.1 |
| | YVDGVEVHNAKTKPREEQYNSTYRVVSVLTVLHQDWLNGKEYKC | with hole, LALAPG, and |
| | KVSNKALGAPIEKTISKAKGQPREPQVYTLPPSRDELTKNQVSLSCA | YTE mutations |
| | VKGFYPSDIAVEWESYGTEWANYKTTPPVLDSDGSFFLVSKLTVSK | |
| | SEWQQGFVFSCSVMHEALHNHYTQKSLSLSPGK | |
| 289 | APELLGGPSVFLFPPKPKDTLMISRTPEVTCVVVDVSHEDPEVKFNW | Clone CH3C.35.23.1.1 |
| | YVDGVEVHNAKTKPREEQYNSTYRVVSVLTVLHQDWLNGKEYKC | with knob mutation |
| | KVSNKALPAPIEKTISKAKGQPREPQVYTLPPSRDELTKNQVSLWCL | |
| | VKGFYPSDIAVEWESFGTEWSNYKTTPPVLDSDGSFFLYSKLTVSKE | |
| | EWQQGFVFSCSVMHEALHNHYTQKSLSLSPGK | |
| 290 | APEAAGGPSVFLFPPKPKDTLMISRTPEVTCVVVDVSHEDPEVKFNW | Clone CH3C.35.23.1.1 |
| | YVDGVEVHNAKTKPREEQYNSTYRVVSVLTVLHQDWLNGKEYKC | with knob and LALA |
| | KVSNKALPAPIEKTISKAKGQPREPQVYTLPPSRDELTKNQVSLWCL | mutations |
| | VKGFYPSDIAVEWESFGTEWSNYKTTPPVLDSDGSFFLYSKLTVSKE | |
| | EWQQGFVFSCSVMHEALHNHYTQKSLSLSPGK | |
| 291 | APEAAGGPSVFLFPPKPKDTLMISRTPEVTCVVVDVSHEDPEVKFNW | Clone CH3C.35.23.1.1 |
| | YVDGVEVHNAKTKPREEQYNSTYRVVSVLTVLHQDWLNGKEYKC | with knob and LALAPG |
| | KVSNKALGAPIEKTISKAKGQPREPQVYTLPPSRDELTKNQVSLWCL | mutations |
| | VKGFYPSDIAVEWESFGTEWSNYKTTPPVLDSDGSFFLYSKLTVSKE | |
| | EWQQGFVFSCSVMHEALHNHYTQKSLSLSPGK | |
| 292 | APELLGGPSVFLFPPKPKDTLYITREPEVTCVVVDVSHEDPEVKFNW | Clone CH3C.35.23.1.1 |
| | YVDGVEVHNAKTKPREEQYNSTYRVVSVLTVLHQDWLNGKEYKC | with knob and YTE |
| | KVSNKALPAPIEKTISKAKGQPREPQVYTLPPSRDELTKNQVSLWCL | mutations |
| | VKGFYPSDIAVEWESFGTEWSNYKTTPPVLDSDGSFFLYSKLTVSKE | |
| | EWQQGFVFSCSVMHEALHNHYTQKSLSLSPGK | |
| 293 | APEAAGGPSVFLFPPKPKDTLYITREPEVTCVVVDVSHEDPEVKFNW | Clone CH3C.35.23.1.1 |
| | YVDGVEVHNAKTKPREEQYNSTYRVVSVLTVLHQDWLNGKEYKC | with knob, LALA, and |
| | KVSNKALPAPIEKTISKAKGQPREPQVYTLPPSRDELTKNQVSLWCL | YTE mutations |
| | VKGFYPSDIAVEWESFGTEWSNYKTTPPVLDSDGSFFLYSKLTVSKE | |
| | EWQQGFVFSCSVMHEALHNHYTQKSLSLSPGK | |
| 294 | APEAAGGPSVFLFPPKPKDTLYITREPEVTCVVVDVSHEDPEVKFNW | Clone CH3C.35.23.1.1 |
| | YVDGVEVHNAKTKPREEQYNSTYRVVSVLTVLHQDWLNGKEYKC | with knob, LALAPG, and |
| | KVSNKALGAPIEKTISKAKGQPREPQVYTLPPSRDELTKNQVSLWCL | YTE mutations |
| | VKGFYPSDIAVEWESFGTEWSNYKTTPPVLDSDGSFFLYSKLTVSKE | |
| | EWQQGFVFSCSVMHEALHNHYTQKSLSLSPGK | |
| 295 | APELLGGPSVFLFPPKPKDTLMISRTPEVTCVVVDVSHEDPEVKFNW | Clone CH3C.35.23.1.1 |
| | YVDGVEVHNAKTKPREEQYNSTYRVVSVLTVLHQDWLNGKEYKC | with hole mutations |
| | KVSNKALPAPIEKTISKAKGQPREPQVYTLPPSRDELTKNQVSLSCA | |
| | VKGFYPSDIAVEWESFGTEWSNYKTTPPVLDSDGSFFLVSKLTVSKE | |
| | EWQQGFVFSCSVMHEALHNHYTQKSLSLSPGK | |
| 296 | APEAAGGPSVFLFPPKPKDTLMISRTPEVTCVVVDVSHEDPEVKFNW | Clone CH3C.35.23.1.1 |
| | YVDGVEVHNAKTKPREEQYNSTYRVVSVLTVLHQDWLNGKEYKC | with hole and LALA |
| | KVSNKALPAPIEKTISKAKGQPREPQVYTLPPSRDELTKNQVSLSCA | mutations |
| | VKGFYPSDIAVEWESFGTEWSNYKTTPPVLDSDGSFFLVSKLTVSKE | |
| | EWQQGFVFSCSVMHEALHNHYTQKSLSLSPGK | |
| 297 | APEAAGGPSVFLFPPKPKDTLMISRTPEVTCVVVDVSHEDPEVKFNW | Clone CH3C.35.23.1.1 |
| | YVDGVEVHNAKTKPREEQYNSTYRVVSVLTVLHQDWLNGKEYKC | with hole and LALAPG |
| | KVSNKALGAPIEKTISKAKGQPREPQVYTLPPSRDELTKNQVSLSCA | mutations |
| | VKGFYPSDIAVEWESFGTEWSNYKTTPPVLDSDGSFFLVSKLTVSKE | |
| | EWQQGFVFSCSVMHEALHNHYTQKSLSLSPGK | |
| 298 | APELLGGPSVFLFPPKPKDTLYITREPEVTCVVVDVSHEDPEVKFNW | Clone CH3C.35.23.1.1 |
| | YVDGVEVHNAKTKPREEQYNSTYRVVSVLTVLHQDWLNGKEYKC | with hole and YTE |
| | KVSNKALPAPIEKTISKAKGQPREPQVYTLPPSRDELTKNQVSLSCA | mutations |
| | VKGFYPSDIAVEWESFGTEWSNYKTTPPVLDSDGSFFLVSKLTVSKE | |
| | EWQQGFVFSCSVMHEALHNHYTQKSLSLSPGK | |
| 299 | APEAAGGPSVFLFPPKPKDTLYITREPEVTCVVVDVSHEDPEVKFNW | Clone CH3C.35.23.1.1 |
| | YVDGVEVHNAKTKPREEQYNSTYRVVSVLTVLHQDWLNGKEYKC | with hole, LALA, and |
| | KVSNKALPAPIEKTISKAKGQPREPQVYTLPPSRDELTKNQVSLSCA | YTE mutations |
| | VKGFYPSDIAVEWESFGTEWSNYKTTPPVLDSDGSFFLVSKLTVSKE | |
| | EWQQGFVFSCSVMHEALHNHYTQKSLSLSPGK | |
| 300 | APEAAGGPSVFLFPPKPKDTLYITREPEVTCVVVDVSHEDPEVKFNW | Clone CH3C.35.23.1.1 |
| | YVDGVEVHNAKTKPREEQYNSTYRVVSVLTVLHQDWLNGKEYKC | with hole, LALAPG, and |
| | KVSNKALGAPIEKTISKAKGQPREPQVYTLPPSRDELTKNQVSLSCA | YTE mutations |
| | VKGFYPSDIAVEWESFGTEWSNYKTTPPVLDSDGSFFLVSKLTVSKE | |
| | EWQQGFVFSCSVMHEALHNHYTQKSLSLSPGK | |
| 301 | APELLGGPSVFLFPPKPKDTLMISRTPEVTCVVVDVSHEDPEVKFNW | Clone CH3C.35.20.1 |
| | YVDGVEVHNAKTKPREEQYNSTYRVVSVLTVLHQDWLNGKEYKC | M428L and N434S |
| | KVSNKALPAPIEKTISKAKGQPREPQVYTLPPSRDELTKNQVSLTCL | mutations |
| | VKGFYPSDIAVEWESFGTEWSSYKTTPPVLDSDGSFFLYSKLTVTKE | |
| | EWQQGFVFSCSVLHEALHSHYTQKSLSLSPGK | |
| 302 | APELLGGPSVFLFPPKPKDTLMISRTPEVTCVVVDVSHEDPEVKFNW | Clone CH3C.35.20.1 with |
| | YVDGVEVHNAKTKPREEQYNSTYRVVSVLTVLHQDWLNGKEYKC | knob and M428L and |
| | KVSNKALPAPIEKTISKAKGQPREPQVYTLPPSRDELTKNQVSLWCL | N434S mutations |
| | VKGFYPSDIAVEWESFGTEWSSYKTTPPVLDSDGSFFLYSKLTVTKE | |
| | EWQQGFVFSCSVLHEALHSHYTQKSLSLSPGK | |
| 303 | APEAAGGPSVFLFPPKPKDTLMISRTPEVTCVVVDVSHEDPEVKFNW | Clone CH3C.35.20.1 with |
| | YVDGVEVHNAKTKPREEQYNSTYRVVSVLTVLHQDWLNGKEYKC | knob, LALA, and M428L |
| | KVSNKALPAPIEKTISKAKGQPREPQVYTLPPSRDELTKNQVSLWCL | and N434S mutations |
| | VKGFYPSDIAVEWESFGTEWSSYKTTPPVLDSDGSFFLYSKLTVTKE | |
| | EWQQGFVFSCSVLHEALHSHYTQKSLSLSPGK | |
| 304 | APEAAGGPSVFLFPPKPKDTLMISRTPEVTCVVVDVSHEDPEVKFNW | Clone CH3C.35.20.1 with |
| | YVDGVEVHNAKTKPREEQYNSTYRVVSVLTVLHQDWLNGKEYKC | knob, LALAPG, and |
| | KVSNKALGAPIEKTISKAKGQPREPQVYTLPPSRDELTKNQVSLWCL | M428L and N434S |
| | VKGFYPSDIAVEWESFGTEWSSYKTTPPVLDSDGSFFLYSKLTVTKE | mutations |
| | EWQQGFVFSCSVLHEALHSHYTQKSLSLSPGK | |
| 305 | APELLGGPSVFLFPPKPKDTLMISRTPEVTCVVVDVSHEDPEVKFNW | Clone CH3C.35.20.1 with |
| | YVDGVEVHNAKTKPREEQYNSTYRVVSVLTVLHQDWLNGKEYKC | hole and M428L and |
| | KVSNKALPAPIEKTISKAKGQPREPQVYTLPPSRDELTKNQVSLSCA | N4345 mutations |
| | VKGFYPSDIAVEWESFGTEWSSYKTTPPVLDSDGSFFLVSKLTVTKE | |
| | EWQQGFVFSCSVLHEALHSHYTQKSLSLSPGK | |
| 306 | APEAAGGPSVFLFPPKPKDTLMISRTPEVTCVVVDVSHEDPEVKFNW | Clone CH3C.35.20.1 with |
| | YVDGVEVHNAKTKPREEQYNSTYRVVSVLTVLHQDWLNGKEYKC | hole, LALA, and M428L |
| | KVSNKALPAPIEKTISKAKGQPREPQVYTLPPSRDELTKNQVSLSCA | and N434S mutations |
| | VKGFYPSDIAVEWESFGTEWSSYKTTPPVLDSDGSFFLVSKLTVTKE | |
| | EWQQGFVFSCSVLHEALHSHYTQKSLSLSPGK | |
| 307 | APEAAGGPSVFLFPPKPKDTLMISRTPEVTCVVVDVSHEDPEVKFNW | Clone CH3C.35.20.1 with |
| | YVDGVEVHNAKTKPREEQYNSTYRVVSVLTVLHQDWLNGKEYKC | hole LALAPG, and |
| | KVSNKALGAPIEKTISKAKGQPREPQVYTLPPSRDELTKNQVSLSCA | M428L and N434S |
| | VKGFYPSDIAVEWESFGTEWSSYKTTPPVLDSDGSFFLVSKLTVTKE | mutations |
| | EWQQGFVFSCSVLHEALHSHYTQKSLSLSPGK | |
| 308 | APELLGGPSVFLFPPKPKDTLMISRTPEVTCVVVDVSHEDPEVKFNW | Clone CH3C.35.23.2 with |
| | YVDGVEVHNAKTKPREEQYNSTYRVVSVLTVLHQDWLNGKEYKC | M428L and N434S |
| | KVSNKALPAPIEKTISKAKGQPREPQVYTLPPSRDELTKNQVSLTCL | mutations |
| | VKGFYPSDIAVEWESYGTEWANYKTTPPVLDSDGSFFLYSKLTVTK | |
| | EEWQQGFVFSCSVLHEALHSHYTQKSLSLSPGK | |
| 309 | APELLGGPSVFLFPPKPKDTLMISRTPEVTCVVVDVSHEDPEVKFNW | Clone CH3C.35.23.2 with |
| | YVDGVEVHNAKTKPREEQYNSTYRVVSVLTVLHQDWLNGKEYKC | knob and M428L and |
| | KVSNKALPAPIEKTISKAKGQPREPQVYTLPPSRDELTKNQVSLWCL | N434S mutations |
| | VKGFYPSDIAVEWESYGTEWANYKTTPPVLDSDGSFFLYSKLTVTK | |
| | EEWQQGFVFSCSVLHEALHSHYTQKSLSLSPGK | |
| 310 | APEAAGGPSVFLFPPKPKDTLMISRTPEVTCVVVDVSHEDPEVKFNW | Clone CH3C.35.23.2 with |
| | YVDGVEVHNAKTKPREEQYNSTYRVVSVLTVLHQDWLNGKEYKC | knob, LALA, and M428L |
| | KVSNKALPAPIEKTISKAKGQPREPQVYTLPPSRDELTKNQVSLWCL | and N434S mutations |
| | VKGFYPSDIAVEWESYGTEWANYKTTPPVLDSDGSFFLYSKLTVTK | |
| | EEWQQGFVFSCSVLHEALHSHYTQKSLSLSPGK | |
| 311 | APEAAGGPSVFLFPPKPKDTLMISRTPEVTCVVVDVSHEDPEVKFNW | Clone CH3C.35.23.2 with |
| | YVDGVEVHNAKTKPREEQYNSTYRVVSVLTVLHQDWLNGKEYKC | knob, LALAPG, and |
| | KVSNKALGAPIEKTISKAKGQPREPQVYTLPPSRDELTKNQVSLWCL | M428L and N434S |
| | VKGFYPSDIAVEWESYGTEWANYKTTPPVLDSDGSFFLYSKLTVTK | mutations |
| | EEWQQGFVFSCSVLHEALHSHYTQKSLSLSPGK | |
| 312 | APELLGGPSVFLFPPKPKDTLMISRTPEVTCVVVDVSHEDPEVKFNW | Clone CH3C.35.23.2 with |
| | YVDGVEVHNAKTKPREEQYNSTYRVVSVLTVLHQDWLNGKEYKC | hole and M428L and |
| | KVSNKALPAPIEKTISKAKGQPREPQVYTLPPSRDELTKNQVSLSCA | N4345 mutations |
| | VKGFYPSDIAVEWESYGTEWANYKTTPPVLDSDGSFFLVSKLTVTK | |
| | EEWQQGFVFSCSVLHEALHSHYTQKSLSLSPGK | |
| 313 | APEAAGGPSVFLFPPKPKDTLMISRTPEVTCVVVDVSHEDPEVKFNW | Clone CH3C.35.23.2 with |
| | YVDGVEVHNAKTKPREEQYNSTYRVVSVLTVLHQDWLNGKEYKC | hole, LALA, and M428L |
| | KVSNKALPAPIEKTISKAKGQPREPQVYTLPPSRDELTKNQVSLSCA | and N4345 mutations |
| | VKGFYPSDIAVEWESYGTEWANYKTTPPVLDSDGSFFLVSKLTVTK | |
| | EEWQQGFVFSCSVLHEALHSHYTQKSLSLSPGK | |
| 314 | APEAAGGPSVFLFPPKPKDTLMISRTPEVTCVVVDVSHEDPEVKFNW | Clone CH3C.35.23.2 with |
| | YVDGVEVHNAKTKPREEQYNSTYRVVSVLTVLHQDWLNGKEYKC | hole LALAPG, and |
| | KVSNKALGAPIEKTISKAKGQPREPQVYTLPPSRDELTKNQVSLSCA | M428L and N434S |
| | VKGFYPSDIAVEWESYGTEWANYKTTPPVLDSDGSFFLVSKLTVTK | mutations |
| | EEWQQGFVFSCSVLHEALHSHYTQKSLSLSPGK | |
| 315 | APELLGGPSVFLFPPKPKDTLMISRTPEVTCVVVDVSHEDPEVKFNW | Clone CH3C.35.23.3 with |
| | YVDGVEVHNAKTKPREEQYNSTYRVVSVLTVLHQDWLNGKEYKC | M428L and N4345 |
| | KVSNKALPAPIEKTISKAKGQPREPQVYTLPPSRDELTKNQVSLTCL | mutations |
| | VKGFYPSDIAVEWESYGTEWVNYKTTPPVLDSDGSFFLYSKLTVTK | |
| | EEWQQGFVFSCSVLHEALHSHYTQKSLSLSPGK | |
| 316 | APELLGGPSVFLFPPKPKDTLMISRTPEVTCVVVDVSHEDPEVKFNW | Clone CH3C.35.23.3 with |
| | YVDGVEVHNAKTKPREEQYNSTYRVVSVLTVLHQDWLNGKEYKC | knob and M428L and |
| | KVSNKALPAPIEKTISKAKGQPREPQVYTLPPSRDELTKNQVSLWCL | N4345 mutations |
| | VKGFYPSDIAVEWESYGTEWVNYKTTPPVLDSDGSFFLYSKLTVTK | |
| | EEWQQGFVFSCSVLHEALHSHYTQKSLSLSPGK | |
| 317 | APEAAGGPSVFLFPPKPKDTLMISRTPEVTCVVVDVSHEDPEVKFNW | Clone CH3C.35.23.3 with |
| | YVDGVEVHNAKTKPREEQYNSTYRVVSVLTVLHQDWLNGKEYKC | knob, LALA, and M428L |
| | KVSNKALPAPIEKTISKAKGQPREPQVYTLPPSRDELTKNQVSLWCL | and N434S mutations |
| | VKGFYPSDIAVEWESYGTEWVNYKTTPPVLDSDGSFFLYSKLTVTK | |
| | EEWQQGFVFSCSVLHEALHSHYTQKSLSLSPGK | |
| 318 | APEAAGGPSVFLFPPKPKDTLMISRTPEVTCVVVDVSHEDPEVKFNW | Clone CH3C.35.23.3 with |
| | YVDGVEVHNAKTKPREEQYNSTYRVVSVLTVLHQDWLNGKEYKC | knob, LALAPG, and |
| | KVSNKALGAPIEKTISKAKGQPREPQVYTLPPSRDELTKNQVSLWCL | M428L and N434S |
| | VKGFYPSDIAVEWESYGTEWVNYKTTPPVLDSDGSFFLYSKLTVTK | mutations |
| | EEWQQGFVFSCSVLHEALHSHYTQKSLSLSPGK | |
| 319 | APELLGGPSVFLFPPKPKDTLMISRTPEVTCVVVDVSHEDPEVKFNW | Clone CH3C.35.23.3 with |
| | YVDGVEVHNAKTKPREEQYNSTYRVVSVLTVLHQDWLNGKEYKC | hole and M428L and |
| | KVSNKALPAPIEKTISKAKGQPREPQVYTLPPSRDELTKNQVSLSCA | N434S mutations |
| | VKGFYPSDIAVEWESYGTEWVNYKTTPPVLDSDGSFFLVSKLTVTK | |
| | EEWQQGFVFSCSVLHEALHSHYTQKSLSLSPGK | |
| 320 | APEAAGGPSVFLFPPKPKDTLMISRTPEVTCVVVDVSHEDPEVKFNW | Clone CH3C.35.23.3 with |
| | YVDGVEVHNAKTKPREEQYNSTYRVVSVLTVLHQDWLNGKEYKC | hole, LALA, and M428L |
| | KVSNKALPAPIEKTISKAKGQPREPQVYTLPPSRDELTKNQVSLSCA | and N434S mutations |
| | VKGFYPSDIAVEWESYGTEWVNYKTTPPVLDSDGSFFLVSKLTVTK | |
| | EEWQQGFVFSCSVLHEALHSHYTQKSLSLSPGK | |
| 321 | APEAAGGPSVFLFPPKPKDTLMISRTPEVTCVVVDVSHEDPEVKFNW | Clone CH3C.35.23.3 with |
| | YVDGVEVHNAKTKPREEQYNSTYRVVSVLTVLHQDWLNGKEYKC | hole LALAPG, and |
| | KVSNKALGAPIEKTISKAKGQPREPQVYTLPPSRDELTKNQVSLSCA | M428L and N4345 |
| | VKGFYPSDIAVEWESYGTEWVNYKTTPPVLDSDGSFFLVSKLTVTK | mutations |
| | EEWQQGFVFSCSVLHEALHSHYTQKSLSLSPGK | |
| 322 | APELLGGPSVFLFPPKPKDTLMISRTPEVTCVVVDVSHEDPEVKFNW | Clone CH3C.35.23.4 with |
| | YVDGVEVHNAKTKPREEQYNSTYRVVSVLTVLHQDWLNGKEYKC | M428L and N434S |
| | KVSNKALPAPIEKTISKAKGQPREPQVYTLPPSRDELTKNQVSLTCL | mutations |
| | VKGFYPSDIAVEWESYGTEWSNYKTTPPVLDSDGSFFLYSKLTVSKE | |
| | EWQQGFVFSCSVLHEALHSHYTQKSLSLSPGK | |
| 323 | APELLGGPSVFLFPPKPKDTLMISRTPEVTCVVVDVSHEDPEVKFNW | Clone CH3C.35.23.4 with |
| | YVDGVEVHNAKTKPREEQYNSTYRVVSVLTVLHQDWLNGKEYKC | knob and M428L and |
| | KVSNKALPAPIEKTISKAKGQPREPQVYTLPPSRDELTKNQVSLWCL | N434S mutations |
| | VKGFYPSDIAVEWESYGTEWSNYKTTPPVLDSDGSFFLYSKLTVSKE | |
| | EWQQGFVFSCSVLHEALHSHYTQKSLSLSPGK | |
| 324 | APEAAGGPSVFLFPPKPKDTLMISRTPEVTCVVVDVSHEDPEVKFNW | Clone CH3C.35.23.4 with |
| | YVDGVEVHNAKTKPREEQYNSTYRVVSVLTVLHQDWLNGKEYKC | knob, LALA, and M428L |
| | KVSNKALPAPIEKTISKAKGQPREPQVYTLPPSRDELTKNQVSLWCL | and N4345 mutations |
| | VKGFYPSDIAVEWESYGTEWSNYKTTPPVLDSDGSFFLYSKLTVSKE | |
| | EWQQGFVFSCSVLHEALHSHYTQKSLSLSPGK | |
| 325 | APEAAGGPSVFLFPPKPKDTLMISRTPEVTCVVVDVSHEDPEVKFNW | Clone CH3C.35.23.4 with |
| | YVDGVEVHNAKTKPREEQYNSTYRVVSVLTVLHQDWLNGKEYKC | knob, LALAPG, and |
| | KVSNKALGAPIEKTISKAKGQPREPQVYTLPPSRDELTKNQVSLWCL | M428L and N434S |
| | VKGFYPSDIAVEWESYGTEWSNYKTTPPVLDSDGSFFLYSKLTVSKE | mutations |
| | EWQQGFVFSCSVLHEALHSHYTQKSLSLSPGK | |
| 326 | APELLGGPSVFLFPPKPKDTLMISRTPEVTCVVVDVSHEDPEVKFNW | Clone CH3C.35.23.4 with |
| | YVDGVEVHNAKTKPREEQYNSTYRVVSVLTVLHQDWLNGKEYKC | hole and M428L and |
| | KVSNKALPAPIEKTISKAKGQPREPQVYTLPPSRDELTKNQVSLSCA | N4345 mutations |
| | VKGFYPSDIAVEWESYGTEWSNYKTTPPVLDSDGSFFLVSKLTVSKE | |
| | EWQQGFVFSCSVLHEALHSHYTQKSLSLSPGK | |
| 327 | APEAAGGPSVFLFPPKPKDTLMISRTPEVTCVVVDVSHEDPEVKFNW | Clone CH3C.35.23.4 with |
| | YVDGVEVHNAKTKPREEQYNSTYRVVSVLTVLHQDWLNGKEYKC | hole, LALA, and M428L |
| | KVSNKALPAPIEKTISKAKGQPREPQVYTLPPSRDELTKNQVSLSCA | and N4345 mutations |
| | VKGFYPSDIAVEWESYGTEWSNYKTTPPVLDSDGSFFLVSKLTVSKE | |
| | EWQQGFVFSCSVLHEALHSHYTQKSLSLSPGK | |
| 328 | APEAAGGPSVFLFPPKPKDTLMISRTPEVTCVVVDVSHEDPEVKFNW | Clone CH3C.35.23.4 with |
| | YVDGVEVHNAKTKPREEQYNSTYRVVSVLTVLHQDWLNGKEYKC | hole LALAPG, and |
| | KVSNKALGAPIEKTISKAKGQPREPQVYTLPPSRDELTKNQVSLSCA | M428L and N434S |
| | VKGFYPSDIAVEWESYGTEWSNYKTTPPVLDSDGSFFLVSKLTVSKE | mutations |
| | EWQQGFVFSCSVLHEALHSHYTQKSLSLSPGK | |
| 329 | APELLGGPSVFLFPPKPKDTLMISRTPEVTCVVVDVSHEDPEVKFNW | Clone CH3C.35.21.17.2 |
| | YVDGVEVHNAKTKPREEQYNSTYRVVSVLTVLHQDWLNGKEYKC | with M428L and N434S |
| | KVSNKALPAPIEKTISKAKGQPREPQVYTLPPSRDELTKNQVSLTCL | mutations |
| | VKGFYPSDIAVLWESYGTEWASYKTTPPVLDSDGSFFLYSKLTVTKE | |
| | EWQQGFVFSCSVLHEALHSHYTQKSLSLSPGK | |
| 330 | APELLGGPSVFLFPPKPKDTLMISRTPEVTCVVVDVSHEDPEVKFNW | Clone CH3C.35.21.17.2 |
| | YVDGVEVHNAKTKPREEQYNSTYRVVSVLTVLHQDWLNGKEYKC | with knob and M428L and |
| | KVSNKALPAPIEKTISKAKGQPREPQVYTLPPSRDELTKNQVSLWCL | N434S mutations |
| | VKGFYPSDIAVLWESYGTEWASYKTTPPVLDSDGSFFLYSKLTVTKE | |
| | EWQQGFVFSCSVLHEALHSHYTQKSLSLSPGK | |
| 331 | APEAAGGPSVFLFPPKPKDTLMISRTPEVTCVVVDVSHEDPEVKFNW | Clone CH3C.35.21.17.2 |
| | YVDGVEVHNAKTKPREEQYNSTYRVVSVLTVLHQDWLNGKEYKC | with knob, LALA, and |
| | KVSNKALPAPIEKTISKAKGQPREPQVYTLPPSRDELTKNQVSLWCL | M428L and N434S |
| | VKGFYPSDIAVLWESYGTEWASYKTTPPVLDSDGSFFLYSKLTVTKE | mutations |
| | EWQQGFVFSCSVLHEALHSHYTQKSLSLSPGK | |
| 332 | APEAAGGPSVFLFPPKPKDTLMISRTPEVTCVVVDVSHEDPEVKFNW | Clone CH3C.35.21.17.2 |
| | YVDGVEVHNAKTKPREEQYNSTYRVVSVLTVLHQDWLNGKEYKC | with knob, LALAPG, and |
| | KVSNKALGAPIEKTISKAKGQPREPQVYTLPPSRDELTKNQVSLWCL | M428L and N434S |
| | VKGFYPSDIAVLWESYGTEWASYKTTPPVLDSDGSFFLYSKLTVTKE | mutations |
| | EWQQGFVFSCSVLHEALHSHYTQKSLSLSPGK | |
| 333 | APELLGGPSVFLFPPKPKDTLMISRTPEVTCVVVDVSHEDPEVKFNW | Clone CH3C.35.21.17.2 |
| | YVDGVEVHNAKTKPREEQYNSTYRVVSVLTVLHQDWLNGKEYKC | with hole and M428L and |
| | KVSNKALPAPIEKTISKAKGQPREPQVYTLPPSRDELTKNQVSLSCA | N434S mutations |
| | VKGFYPSDIAVLWESYGTEWASYKTTPPVLDSDGSFFLVSKLTVTKE | |
| | EWQQGFVFSCSVLHEALHSHYTQKSLSLSPGK | |
| 334 | APEAAGGPSVFLFPPKPKDTLMISRTPEVTCVVVDVSHEDPEVKFNW | Clone CH3C.35.21.17.2 |
| | YVDGVEVHNAKTKPREEQYNSTYRVVSVLTVLHQDWLNGKEYKC | with hole, LALA, and |
| | KVSNKALPAPIEKTISKAKGQPREPQVYTLPPSRDELTKNQVSLSCA | M428L and N434S |
| | VKGFYPSDIAVLWESYGTEWASYKTTPPVLDSDGSFFLVSKLTVTKE | mutations |
| | EWQQGFVFSCSVLHEALHSHYTQKSLSLSPGK | |
| 335 | APEAAGGPSVFLFPPKPKDTLMISRTPEVTCVVVDVSHEDPEVKFNW | Clone CH3C.35.21.17.2 |
| | YVDGVEVHNAKTKPREEQYNSTYRVVSVLTVLHQDWLNGKEYKC | with hole, LALAPG, and |
| | KVSNKALGAPIEKTISKAKGQPREPQVYTLPPSRDELTKNQVSLSCA | M428L and N434S |
| | VKGFYPSDIAVLWESYGTEWASYKTTPPVLDSDGSFFLVSKLTVTKE | mutations |
| | EWQQGFVFSCSVLHEALHSHYTQKSLSLSPGK | |
| 336 | APELLGGPSVFLFPPKPKDTLMISRTPEVTCVVVDVSHEDPEVKFNW | Clone CH3C.35.23 with |
| | YVDGVEVHNAKTKPREEQYNSTYRVVSVLTVLHQDWLNGKEYKC | M428L and N434S |
| | KVSNKALPAPIEKTISKAKGQPREPQVYTLPPSRDELTKNQVSLTCL | mutations |
| | VKGFYPSDIAVEWESYGTEWSNYKTTPPVLDSDGSFFLYSKLTVTKE | |
| | EWQQGFVFSCSVLHEALHSHYTQKSLSLSPGK | |
| 337 | APELLGGPSVFLFPPKPKDTLMISRTPEVTCVVVDVSHEDPEVKFNW | Clone CH3C.35.23 with |
| | YVDGVEVHNAKTKPREEQYNSTYRVVSVLTVLHQDWLNGKEYKC | knob and M428L and |
| | KVSNKALPAPIEKTISKAKGQPREPQVYTLPPSRDELTKNQVSLWCL | N434S mutations |
| | VKGFYPSDIAVEWESYGTEWSNYKTTPPVLDSDGSFFLYSKLTVTKE | |
| | EWQQGFVFSCSVLHEALHSHYTQKSLSLSPGK | |
| 338 | APEAAGGPSVFLFPPKPKDTLMISRTPEVTCVVVDVSHEDPEVKFNW | Clone CH3C.35.23 with |
| | YVDGVEVHNAKTKPREEQYNSTYRVVSVLTVLHQDWLNGKEYKC | knob, LALA, and M428L |
| | KVSNKALPAPIEKTISKAKGQPREPQVYTLPPSRDELTKNQVSLWCL | and N434S mutations |
| | VKGFYPSDIAVEWESYGTEWSNYKTTPPVLDSDGSFFLYSKLTVTKE | |
| | EWQQGFVFSCSVLHEALHSHYTQKSLSLSPGK | |
| 339 | APEAAGGPSVFLFPPKPKDTLMISRTPEVTCVVVDVSHEDPEVKFNW | Clone CH3C.35.23 with |
| | YVDGVEVHNAKTKPREEQYNSTYRVVSVLTVLHQDWLNGKEYKC | knob, LALAPG, and |
| | KVSNKALGAPIEKTISKAKGQPREPQVYTLPPSRDELTKNQVSLWCL | M428L and N434S |
| | VKGFYPSDIAVEWESYGTEWSNYKTTPPVLDSDGSFFLYSKLTVTKE | mutations |
| | EWQQGFVFSCSVLHEALHSHYTQKSLSLSPGK | |
| 340 | APELLGGPSVFLFPPKPKDTLMISRTPEVTCVVVDVSHEDPEVKFNW | Clone CH3C.35.23 with |
| | YVDGVEVHNAKTKPREEQYNSTYRVVSVLTVLHQDWLNGKEYKC | hole and M428L and |
| | KVSNKALPAPIEKTISKAKGQPREPQVYTLPPSRDELTKNQVSLSCA | N434S mutations |
| | VKGFYPSDIAVEWESYGTEWSNYKTTPPVLDSDGSFFLVSKLTVTKE | |
| | EWQQGFVFSCSVLHEALHSHYTQKSLSLSPGK | |
| 341 | APEAAGGPSVFLFPPKPKDTLMISRTPEVTCVVVDVSHEDPEVKFNW | Clone CH3C.35.23 with |
| | YVDGVEVHNAKTKPREEQYNSTYRVVSVLTVLHQDWLNGKEYKC | hole, LALA, and M428L |
| | KVSNKALPAPIEKTISKAKGQPREPQVYTLPPSRDELTKNQVSLSCA | and N4345 mutations |
| | VKGFYPSDIAVEWESYGTEWSNYKTTPPVLDSDGSFFLVSKLTVTKE | |
| | EWQQGFVFSCSVLHEALHSHYTQKSLSLSPGK | |
| 342 | APEAAGGPSVFLFPPKPKDTLMISRTPEVTCVVVDVSHEDPEVKFNW | Clone CH3C.35.23 with |
| | YVDGVEVHNAKTKPREEQYNSTYRVVSVLTVLHQDWLNGKEYKC | hole LALAPG, and |
| | KVSNKALGAPIEKTISKAKGQPREPQVYTLPPSRDELTKNQVSLSCA | M428L and N434S |
| | VKGFYPSDIAVEWESYGTEWSNYKTTPPVLDSDGSFFLVSKLTVTKE | mutations |
| | EWQQGFVFSCSVLHEALHSHYTQKSLSLSPGK | |
| 343 | APELLGGPSVFLFPPKPKDTLMISRTPEVTCVVVDVSHEDPEVKFNW | Clone CH3C.35.21 with |
| | YVDGVEVHNAKTKPREEQYNSTYRVVSVLTVLHQDWLNGKEYKC | M428L and N4345 |
| | KVSNKALPAPIEKTISKAKGQPREPQVYTLPPSRDELTKNQVSLTCL | mutations |
| | VKGFYPSDIAVWWESYGTEWSSYKTTPPVLDSDGSFFLYSKLTVTK | |
| | EEWQQGFVFSCSVLHEALHSHYTQKSLSLSPGK | |
| 344 | APELLGGPSVFLFPPKPKDTLMISRTPEVTCVVVDVSHEDPEVKFNW | Clone CH3C.35.21 with |
| | YVDGVEVHNAKTKPREEQYNSTYRVVSVLTVLHQDWLNGKEYKC | knob and M428L and |
| | KVSNKALPAPIEKTISKAKGQPREPQVYTLPPSRDELTKNQVSLWCL | N4345 mutations |
| | VKGFYPSDIAVWWESYGTEWSSYKTTPPVLDSDGSFFLYSKLTVTK | |
| | EEWQQGFVFSCSVLHEALHSHYTQKSLSLSPGK | |
| 345 | APEAAGGPSVFLFPPKPKDTLMISRTPEVTCVVVDVSHEDPEVKFNW | Clone CH3C.35.21 with |
| | YVDGVEVHNAKTKPREEQYNSTYRVVSVLTVLHQDWLNGKEYKC | knob, LALA, and M428L |
| | KVSNKALPAPIEKTISKAKGQPREPQVYTLPPSRDELTKNQVSLWCL | and N4345 mutations |
| | VKGFYPSDIAVWWESYGTEWSSYKTTPPVLDSDGSFFLYSKLTVTK | |
| | EEWQQGFVFSCSVLHEALHSHYTQKSLSLSPGK | |
| 346 | APEAAGGPSVFLFPPKPKDTLMISRTPEVTCVVVDVSHEDPEVKFNW | Clone CH3C.35.21 with |
| | YVDGVEVHNAKTKPREEQYNSTYRVVSVLTVLHQDWLNGKEYKC | knob, LALAPG, and |
| | KVSNKALGAPIEKTISKAKGQPREPQVYTLPPSRDELTKNQVSLWCL | M428L and N434S |
| | VKGFYPSDIAVWWESYGTEWSSYKTTPPVLDSDGSFFLYSKLTVTK | mutations |
| | EEWQQGFVFSCSVLHEALHSHYTQKSLSLSPGK | |
| 347 | APELLGGPSVFLFPPKPKDTLMISRTPEVTCVVVDVSHEDPEVKFNW | Clone CH3C.35.21 with |
| | YVDGVEVHNAKTKPREEQYNSTYRVVSVLTVLHQDWLNGKEYKC | hole and M428L and |
| | KVSNKALPAPIEKTISKAKGQPREPQVYTLPPSRDELTKNQVSLSCA | N4345 mutations |
| | VKGFYPSDIAVWWESYGTEWSSYKTTPPVLDSDGSFFLVSKLTVTK | |
| | EEWQQGFVFSCSVLHEALHSHYTQKSLSLSPGK | |
| 348 | APEAAGGPSVFLFPPKPKDTLMISRTPEVTCVVVDVSHEDPEVKFNW | Clone CH3C.35.21 with |
| | YVDGVEVHNAKTKPREEQYNSTYRVVSVLTVLHQDWLNGKEYKC | hole, LALA, and M428L |
| | KVSNKALPAPIEKTISKAKGQPREPQVYTLPPSRDELTKNQVSLSCA | and N4345 mutations |
| | VKGFYPSDIAVWWESYGTEWSSYKTTPPVLDSDGSFFLVSKLTVTK | |
| | EEWQQGFVFSCSVLHEALHSHYTQKSLSLSPGK | |
| 349 | APEAAGGPSVFLFPPKPKDTLMISRTPEVTCVVVDVSHEDPEVKFNW | Clone CH3C.35.21 with |
| | YVDGVEVHNAKTKPREEQYNSTYRVVSVLTVLHQDWLNGKEYKC | hole LALAPG, and |
| | KVSNKALGAPIEKTISKAKGQPREPQVYTLPPSRDELTKNQVSLSCA | M428L and N434S |
| | VKGFYPSDIAVWWESYGTEWSSYKTTPPVLDSDGSFFLVSKLTVTK | mutations |
| | EEWQQGFVFSCSVLHEALHSHYTQKSLSLSPGK | |
| 350 | APELLGGPSVFLFPPKPKDTLMISRTPEVTCVVVDVSHEDPEVKFNW | Clone CH3C.35.20.1.1 |
| | YVDGVEVHNAKTKPREEQYNSTYRVVSVLTVLHQDWLNGKEYKC | with M428L and N434S |
| | KVSNKALPAPIEKTISKAKGQPREPQVYTLPPSRDELTKNQVSLTCL | mutations |
| | VKGFYPSDIAVEWESFGTEWSSYKTTPPVLDSDGSFFLYSKLTVSKE | |
| | EWQQGFVFSCSVLHEALHSHYTQKSLSLSPGK | |
| 351 | APELLGGPSVFLFPPKPKDTLMISRTPEVTCVVVDVSHEDPEVKFNW | Clone CH3C.35.20.1.1 |
| | YVDGVEVHNAKTKPREEQYNSTYRVVSVLTVLHQDWLNGKEYKC | with knob and M428L and |
| | KVSNKALPAPIEKTISKAKGQPREPQVYTLPPSRDELTKNQVSLWCL | N434S mutations |
| | VKGFYPSDIAVEWESFGTEWSSYKTTPPVLDSDGSFFLYSKLTVSKE | |
| | EWQQGFVFSCSVLHEALHSHYTQKSLSLSPGK | |
| 352 | APEAAGGPSVFLFPPKPKDTLMISRTPEVTCVVVDVSHEDPEVKFNW | Clone CH3C.35.20.1.1 |
| | YVDGVEVHNAKTKPREEQYNSTYRVVSVLTVLHQDWLNGKEYKC | with knob, LALA, and |
| | KVSNKALPAPIEKTISKAKGQPREPQVYTLPPSRDELTKNQVSLWCL | M428L and N434S |
| | VKGFYPSDIAVEWESFGTEWSSYKTTPPVLDSDGSFFLYSKLTVSKE | mutations |
| | EWQQGFVFSCSVLHEALHSHYTQKSLSLSPGK | |
| 353 | APEAAGGPSVFLFPPKPKDTLMISRTPEVTCVVVDVSHEDPEVKFNW | Clone CH3C.35.20.1.1 |
| | YVDGVEVHNAKTKPREEQYNSTYRVVSVLTVLHQDWLNGKEYKC | with knob, LALAPG, and |
| | KVSNKALGAPIEKTISKAKGQPREPQVYTLPPSRDELTKNQVSLWCL | M428L and N434S |
| | VKGFYPSDIAVEWESFGTEWSSYKTTPPVLDDGSFFLYSKLTVSKE | mutations |
| | EWQQGFVFSCSVLHEALHSHYTQKSLSLSPGK | |
| 354 | APELLGGPSVFLFPPKPKDTLMISRTPEVTCVVVDVSHEDPEVKFNW | Clone CH3C.35.20.1.1 |
| | YVDGVEVHNAKTKPREEQYNSTYRVVSVLTVLHQDWLNGKEYKC | with hole and M428L and |
| | KVSNKALPAPIEKTISKAKGQPREPQVYTLPPSRDELTKNQVSLSCA | N434S mutations |
| | VKGFYPSDIAVEWESFGTEWSSYKTTPPVLDSDGSFFLVSKLTVSKE | |
| | EWQQGFVFSCSVLHEALHSHYTQKSLSLSPGK | |
| 355 | APEAAGGPSVFLFPPKPKDTLMISRTPEVTCVVVDVSHEDPEVKFNW | Clone CH3C.35.20.1.1 |
| | YVDGVEVHNAKTKPREEQYNSTYRVVSVLTVLHQDWLNGKEYKC | with hole, LALA, and |
| | KVSNKALPAPIEKTISKAKGQPREPQVYTLPPSRDELTKNQVSLSCA | M428L and N434S |
| | VKGFYPSDIAVEWESFGTEWSSYKTTPPVLDSDGSFFLVSKLTVSKE | mutations |
| | EWQQGFVFSCSVLHEALHSHYTQKSLSLSPGK | |
| 356 | APEAAGGPSVFLFPPKPKDTLMISRTPEVTCVVVDVSHEDPEVKFNW | Clone CH3C.35.20.1.1 |
| | YVDGVEVHNAKTKPREEQYNSTYRVVSVLTVLHQDWLNGKEYKC | with hole, LALAPG, and |
| | KVSNKALGAPIEKTISKAKGQPREPQVYTLPPSRDELTKNQVSLSCA | M428L and N434S |
| | VKGFYPSDIAVEWESFGTEWSSYKTTPPVLDSDGSFFLVSKLTVSKE | mutations |
| | EWQQGFVFSCSVLHEALHSHYTQKSLSLSPGK | |
| 357 | APELLGGPSVFLFPPKPKDTLMISRTPEVTCVVVDVSHEDPEVKFNW | Clone CH3C.35.23.2.1 |
| | YVDGVEVHNAKTKPREEQYNSTYRVVSVLTVLHQDWLNGKEYKC | with M428L and N434S |
| | KVSNKALPAPIEKTISKAKGQPREPQVYTLPPSRDELTKNQVSLTCL | mutations |
| | VKGFYPSDIAVEWESYGTEWANYKTTPPVLDSDGSFFLYSKLTVSK | |
| | SEWQQGFVFSCSVLHEALHSHYTQKSLSLSPGK | |
| 358 | APELLGGPSVFLFPPKPKDTLMISRTPEVTCVVVDVSHEDPEVKFNW | Clone CH3C.35.23.2.1 |
| | YVDGVEVHNAKTKPREEQYNSTYRVVSVLTVLHQDWLNGKEYKC | with knob and M428L and |
| | KVSNKALPAPIEKTISKAKGQPREPQVYTLPPSRDELTKNQVSLWCL | N434S mutations |
| | VKGFYPSDIAVEWESYGTEWANYKTTPPVLDSDGSFFLYSKLTVSK | |
| | SEWQQGFVFSCSVLHEALHSHYTQKSLSLSPGK | |
| 359 | APEAAGGPSVFLFPPKPKDTLMISRTPEVTCVVVDVSHEDPEVKFNW | Clone CH3C.35.23.2.1 |
| | YVDGVEVHNAKTKPREEQYNSTYRVVSVLTVLHQDWLNGKEYKC | with knob, LALA, and |
| | KVSNKALPAPIEKTISKAKGQPREPQVYTLPPSRDELTKNQVSLWCL | M428L and N434S |
| | VKGFYPSDIAVEWESYGTEWANYKTTPPVLDSDGSFFLYSKLTVSK | mutations |
| | SEWQQGFVFSCSVLHEALHSHYTQKSLSLSPGK | |
| 360 | APEAAGGPSVFLFPPKPKDTLMISRTPEVTCVVVDVSHEDPEVKFNW | Clone CH3C.35.23.2.1 |
| | YVDGVEVHNAKTKPREEQYNSTYRVVSVLTVLHQDWLNGKEYKC | with knob, LALAPG, and |
| | KVSNKALGAPIEKTISKAKGQPREPQVYTLPPSRDELTKNQVSLWCL | M428L and N434S |
| | VKGFYPSDIAVEWESYGTEWANYKTTPPVLDSDGSFFLYSKLTVSK | mutations |
| | SEWQQGFVFSCSVLHEALHSHYTQKSLSLSPGK | |
| 361 | APELLGGPSVFLFPPKPKDTLMISRTPEVTCVVVDVSHEDPEVKFNW | Clone CH3C.35.23.2.1 |
| | YVDGVEVHNAKTKPREEQYNSTYRVVSVLTVLHQDWLNGKEYKC | with hole and M428L and |
| | KVSNKALPAPIEKTISKAKGQPREPQVYTLPPSRDELTKNQVSLSCA | N434S mutations |
| | VKGFYPSDIAVEWESYGTEWANYKTTPPVLDSDGSFFLVSKLTVSK | |
| | SEWQQGFVFSCSVLHEALHSHYTQKSLSLSPGK | |
| 362 | APEAAGGPSVFLFPPKPKDTLMISRTPEVTCVVVDVSHEDPEVKFNW | Clone CH3C.35.23.2.1 |
| | YVDGVEVHNAKTKPREEQYNSTYRVVSVLTVLHQDWLNGKEYKC | with hole, LALA, and |
| | KVSNKALPAPIEKTISKAKGQPREPQVYTLPPSRDELTKNQVSLSCA | M428L and N434S |
| | VKGFYPSDIAVEWESYGTEWANYKTTPPVLDSDGSFFLVSKLTVSK | mutations |
| | SEWQQGFVFSCSVLHEALHSHYTQKSLSLSPGK | |
| 363 | APEAAGGPSVFLFPPKPKDTLMISRTPEVTCVVVDVSHEDPEVKFNW | Clone CH3C.35.23.2.1 |
| | YVDGVEVHNAKTKPREEQYNSTYRVVSVLTVLHQDWLNGKEYKC | with hole, LALAPG, and |
| | KVSNKALGAPIEKTISKAKGQPREPQVYTLPPSRDELTKNQVSLSCA | mutations |
| | VKGFYPSDIAVEWESYGTEWANYKTTPPVLDSDGSFFLVSKLTVSK | M428L and N434S |
| | SEWQQGFVFSCSVLHEALHSHYTQKSLSLSPGK | |
| 364 | APELLGGPSVFLFPPKPKDTLMISRTPEVTCVVVDVSHEDPEVKFNW | Clone CH3C.35.23.1.1 |
| | YVDGVEVHNAKTKPREEQYNSTYRVVSVLTVLHQDWLNGKEYKC | with M428L and N434S |
| | KVSNKALPAPIEKTISKAKGQPREPQVYTLPPSRDELTKNQVSLTCL | mutations |
| | VKGFYPSDIAVEWESFGTEWSNYKTTPPVLDSDGSFFLYSKLTVSKE | |
| | EWQQGFVFSCSVLHEALHSHYTQKSLSLSPGK | |
| 365 | APELLGGPSVFLFPPKPKDTLMISRTPEVTCVVVDVSHEDPEVKFNW | Clone CH3C.35.23.1.1 |
| | YVDGVEVHNAKTKPREEQYNSTYRVVSVLTVLHQDWLNGKEYKC | with knob and M428L and |
| | KVSNKALPAPIEKTISKAKGQPREPQVYTLPPSRDELTKNQVSLWCL | N434S mutations |
| | VKGFYPSDIAVEWESFGTEWSNYKTTPPVLDSDGSFFLYSKLTVSKE | |
| | EWQQGFVFSCSVLHEALHSHYTQKSLSLSPGK | |
| 366 | APEAAGGPSVFLFPPKPKDTLMISRTPEVTCVVVDVSHEDPEVKFNW | Clone CH3C.35.23.1.1 |
| | YVDGVEVHNAKTKPREEQYNSTYRVVSVLTVLHQDWLNGKEYKC | with knob, LALA, and |
| | KVSNKALPAPIEKTISKAKGQPREPQVYTLPPSRDELTKNQVSLWCL | M428L and N434S |
| | VKGFYPSDIAVEWESFGTEWSNYKTTPPVLDSDGSFFLYSKLTVSKE | mutations |
| | EWQQGFVFSCSVLHEALHSHYTQKSLSLSPGK | |
| 367 | APEAAGGPSVFLFPPKPKDTLMISRTPEVTCVVVDVSHEDPEVKFNW | Clone CH3C.35.23.1.1 |
| | YVDGVEVHNAKTKPREEQYNSTYRVVSVLTVLHQDWLNGKEYKC | with knob, LALAPG, and |
| | KVSNKALGAPIEKTISKAKGQPREPQVYTLPPSRDELTKNQVSLWCL | M428L and N434S |
| | VKGFYPSDIAVEWESFGTEWSNYKTTPPVLDSDGSFFLYSKLTVSKE | mutations |
| | EWQQGFVFSCSVLHEALHSHYTQKSLSLSPGK | |
| 368 | APELLGGPSVFLFPPKPKDTLMISRTPEVTCVVVDVSHEDPEVKFNW | Clone CH3C.35.23.1.1 |
| | YVDGVEVHNAKTKPREEQYNSTYRVVSVLTVLHQDWLNGKEYKC | with hole and M428L and |
| | KVSNKALPAPIEKTISKAKGQPREPQVYTLPPSRDELTKNQVSLSCA | N434S mutations |
| | VKGFYPSDIAVEWESFGTEWSNYKTTPPVLDSDGSFFLVSKLTVSKE | |
| | EWQQGFVFSCSVLHEALHSHYTQKSLSLSPGK | |
| 369 | APEAAGGPSVFLFPPKPKDTLMISRTPEVTCVVVDVSHEDPEVKFNW | Clone CH3C.35.23.1.1 |
| | YVDGVEVHNAKTKPREEQYNSTYRVVSVLTVLHQDWLNGKEYKC | with hole, LALA, and |
| | KVSNKALPAPIEKTISKAKGQPREPQVYTLPPSRDELTKNQVSLSCA | M428L and N434S |
| | VKGFYPSDIAVEWESFGTEWSNYKTTPPVLDSDGSFFLVSKLTVSKE | mutations |
| | EWQQGFVFSCSVLHEALHSHYTQKSLSLSPGK | |
| 370 | APEAAGGPSVFLFPPKPKDTLMISRTPEVTCVVVDVSHEDPEVKFNW | Clone CH3C.35.23.1.1 |
| | YVDGVEVHNAKTKPREEQYNSTYRVVSVLTVLHQDWLNGKEYKC | with hole, LALAPG, and |
| | KVSNKALGAPIEKTISKAKGQPREPQVYTLPPSRDELTKNQVSLSCA | M428L and N434S |
| | VKGFYPSDIAVEWESFGTEWSNYKTTPPVLDSDGSFFLVSKLTVSKE | mutations |
| | EWQQGFVFSCSVLHEALHSHYTQKSLSLSPGK | |
| 371 | GGGGS | Linker sequence |
| 372 | GGGGSGGGGS | Linker sequence |
| 373 | GGGGSGGGGSGGGGS | Linker sequence |
| 374 | RTVAGGGGSGGGGSGGGGS | Linker sequence |
| 375 | ASTKGGGGSGGGGSGGGGS | Linker sequence |
| 376 | EPKSCDKTHTCPPCP | Human IgG1 hinge amino |
| | | acid sequence |
| 377 | APELLGGPSVFLFPPKPKDTLMISRTPEVTCVVVDVSHEDPEVKFNW | Fc sequence with hole |
| | YVDGVEVHNAKTKPREEQYNSTYRVVSVLTVLHQDWLNGKEYKC | mutations |
| | KVSNKALPAPIEKTISKAKGQPREPQVYTLPPSRDELTKNQVSLSCA | |
| | VKGFYPSDIAVEWESNGQPENNYKTTPPVLDSDGSFFLVSKLTVDKS | |
| | RWQQGNVFSCSVMHEALHNHYTQKSLSLSPGK | |
| 378 | APEAAGGPSVFLFPPKPKDTLMISRTPEVTCVVVDVSHEDPEVKFNW | Fc sequence with hole and |
| | YVDGVEVHNAKTKPREEQYNSTYRVVSVLTVLHQDWLNGKEYKC | LALA mutations |
| | KVSNKALPAPIEKTISKAKGQPREPQVYTLPPSRDELTKNQVSLSCA | |
| | VKGFYPSDIAVEWESNGQPENNYKTTPPVLDSDGSFFLVSKLTVDKS | |
| | RWQQGNVFSCSVMHEALHNHYTQKSLSLSPGK | |
| 379 | APELLGGPSVFLFPPKPKDTLYITREPEVTCVVVDVSHEDPEVKFNW | Fc sequence with hole and |
| | YVDGVEVHNAKTKPREEQYNSTYRVVSVLTVLHQDWLNGKEYKC | YTE mutations |
| | KVSNKALPAPIEKTISKAKGQPREPQVYTLPPSRDELTKNQVSLSCA | |
| | VKGFYPSDIAVEWESNGQPENNYKTTPPVLDSDGSFFLVSKLTVDKS | |
| | RWQQGNVFSCSVMHEALHNHYTQKSLSLSPGK | |
| 380 | APEAAGGPSVFLFPPKPKDTLYITREPEVTCVVVDVSHEDPEVKFNW | Fc sequence with hole, |
| | YVDGVEVHNAKTKPREEQYNSTYRVVSVLTVLHQDWLNGKEYKC | LALA, and YTE |
| | KVSNKALPAPIEKTISKAKGQPREPQVYTLPPSRDELTKNQVSLSCA | mutations |
| | VKGFYPSDIAVEWESNGQPENNYKTTPPVLDSDGSFFLVSKLTVDKS | |
| | RWQQGNVFSCSVMHEALHNHYTQKSLSLSPGK | |
| 381 | APELLGGPSVFLFPPKPKDTLMISRTPEVTCVVVDVSHEDPEVKFNW | Fc sequence with hole and |
| | YVDGVEVHNAKTKPREEQYNSTYRVVSVLTVLHQDWLNGKEYKC | M428L and N434S |
| | KVSNKALPAPIEKTISKAKGQPREPQVYTLPPSRDELTKNQVSLSCA | mutations |
| | VKGFYPSDIAVEWESNGQPENNYKTTPPVLDSDGSFFLVSKLTVDKS | |
| | RWQQGNVFSCSVLHEALHSHYTQKSLSLSPGK | |
| 382 | APEAAGGPSVFLFPPKPKDTLMISRTPEVTCVVVDVSHEDPEVKFNW | Fc sequence with hole, |
| | YVDGVEVHNAKTKPREEQYNSTYRVVSVLTVLHQDWLNGKEYKC | LALA, and M428L and |
| | KVSNKALPAPIEKTISKAKGQPREPQVYTLPPSRDELTKNQVSLSCA | N434S mutations |
| | VKGFYPSDIAVEWESNGQPENNYKTTPPVLDSDGSFFLVSKLTVDKS | |
| | RWQQGNVFSCSVLHEALHSHYTQKSLSLSPGK | |
| 383 | APELLGGPSVFLFPPKPKDTLMISRTPEVTCVVVDVSHEDPEVKFNW | Fc sequence with knob |
| | YVDGVEVHNAKTKPREEQYNSTYRVVSVLTVLHQDWLNGKEYKC | mutation |
| | KVSNKALPAPIEKTISKAKGQPREPQVYTLPPSRDELTKNQVSLWCL | |
| | VKGFYPSDIAVEWESNGQPENNYKTTPPVLDSDGSFFLYSKLTVDKS | |
| | RWQQGNVFSCSVMHEALHNHYTQKSLSLSPGK | |
| 384 | APEAAGGPSVFLFPPKPKDTLMISRTPEVTCVVVDVSHEDPEVKFNW | Fc sequence with knob and |
| | YVDGVEVHNAKTKPREEQYNSTYRVVSVLTVLHQDWLNGKEYKC | LALA mutations |
| | KVSNKALPAPIEKTISKAKGQPREPQVYTLPPSRDELTKNQVSLWCL | |
| | VKGFYPSDIAVEWESNGQPENNYKTTPPVLDSDGSFFLYSKLTVDKS | |
| | RWQQGNVFSCSVMHEALHNHYTQKSLSLSPGK | |
| 385 | APELLGGPSVFLFPPKPKDTLYITREPEVTCVVVDVSHEDPEVKFNW | Fc sequence with knob and |
| | YVDGVEVHNAKTKPREEQYNSTYRVVSVLTVLHQDWLNGKEYKC | YTE mutations |
| | KVSNKALPAPIEKTISKAKGQPREPQVYTLPPSRDELTKNQVSLWCL | |
| | VKGFYPSDIAVEWESNGQPENNYKTTPPVLDSDGSFFLYSKLTVDKS | |
| | RWQQGNVFSCSVMHEALHNHYTQKSLSLSPGK | |
| 386 | APEAAGGPSVFLFPPKPKDTLYITREPEVTCVVVDVSHEDPEVKFNW | Fc sequence with knob, |
| | YVDGVEVHNAKTKPREEQYNSTYRVVSVLTVLHQDWLNGKEYKC | LALA, and YTE |
| | KVSNKALPAPIEKTISKAKGQPREPQVYTLPPSRDELTKNQVSLWCL | mutations |
| | VKGFYPSDIAVEWESNGQPENNYKTTPPVLDSDGSFFLYSKLTVDKS | |
| | RWQQGNVFSCSVMHEALHNHYTQKSLSLSPGK | |
| 387 | APELLGGPSVFLFPPKPKDTLMISRTPEVTCVVVDVSHEDPEVKFNW | Fc sequence with knob and |
| | YVDGVEVHNAKTKPREEQYNSTYRVVSVLTVLHQDWLNGKEYKC | M428L and N434S |
| | KVSNKALPAPIEKTISKAKGQPREPQVYTLPPSRDELTKNQVSLWCL | mutations |
| | VKGFYPSDIAVEWESNGQPENNYKTTPPVLDSDGSFFLYSKLTVDKS | |
| | RWQQGNVFSCSVLHEALHSHYTQKSLSLSPGK | |
| 388 | APEAAGGPSVFLFPPKPKDTLMISRTPEVTCVVVDVSHEDPEVKFNW | Fc sequence with knob, |
| | YVDGVEVHNAKTKPREEQYNSTYRVVSVLTVLHQDWLNGKEYKC | LALA, and M428L and |
| | KVSNKALPAPIEKTISKAKGQPREPQVYTLPPSRDELTKNQVSLWCL | N434S mutations |
| | VKGFYPSDIAVEWESNGQPENNYKTTPPVLDSDGSFFLYSKLTVDKS | |
| 389 | GGGGSGGGGSGGGG | Linker sequence |
| 390 | RTVAGGGGSGGGGSGGGGS | Linker sequence |
| 391 | ASTKGGGGSGGGGSGGGGS | Linker sequence |
| 392 | AQNSVIIVDKNGRLVYLVENPGGYVAYSKAATVTGKLVHANFGTK | Apical domain insert of |
| | KDFEDLYTPVNGSIVIVRAGKITFAEKVANAESLNAIGVLIYMDQTK | human tmnsferrin receptor |
| | FPIVNAELSFFGHAHLGTGDPYTPGFPSFNHTQFPPSRSSGLPNIPVQT | protein 1 (TFR1) |
| | ISRAAAEKLFGNMEGDCPSDWKTDSTCRMVTSESKNVKLTVSN | |
| 393 | AQNSVIIVDKNGGLVYLVENPGGYVAYSKAATVTGKLVHANFGTK | Apical domain of Macaca |
| | KDFEDLDSPVNGSIVIVRAGKITFAEKVANAESLNAIGVLIYMDQTK | mulatta (rhesus monkey) |
| | FPIVKADLSFFGHAHLGTGDPYTPGFPSFNHTQFPPSQSSGLPNIPVQT | TfR (NCBI Reference |
| | ISRAAAEKLFGNMEGDCPSDWKTDSTCKMVTSENKSVKLTVSN | Sequence |
| | | NP_001244232.1); it has |
| | | 95% identity to the apical |
| | | domain of the native |
| | | human TfR |
| 394 | AQNSVIIVDKNGSLVYLVENPGGYVAYSKAATVTGKLVHANFGTK | Apical domain of |
| | KDFEDLHTPVNGSIVIVRAGKITFAEKVANAESLNAIGVLIYMDQTK | chimpanzee TfR (NCBI |
| | FPIVNAELSFFGHAHLGTGDPYTPGFPSFNHTQFPPSRSSGLPNIPVQT | Reference Sequence |
| | VSRAAAEKLFGNMEGDCPSDWKTDSTCRMVTSESKNVKLTVSN | XP_003310238.1); it is |
| | | 98% identical to the apical |
| | | domain of the native |
| | | human TfR |
| 395 | AQNSVIIVDKNGGLVYLVENPGGYVAYSKAATVTGKLVHANFGTK | Apical domain of Macaca |
| | KDFEDLDSPVNGSIVIVRAGKITFAEKVANAESLNAIGVLIYMDQTK | fascicularis (cynomolgous |
| | FPIVKADLSFFGHAHLGTGDPYTPGFPSFNHTQFPPSQSSGLPNIPVQT | monkey) TfR (NCBI |
| | ISRAAAEKLFGNMEGDCPSDWKTDSTCKMVTSENKSVKLTVSN | Reference Sequence |
| | | XP_005545315); it is 96% |
| | | identical to the apical |
| | | domain of the native |
| | | human TfR |
| 396 | MMDQARSAFSNLFGGEPLSYTRFSLARQVDGDNSHVEMKLAADEEENA | Chimeric TfR polypeptide |
| | [chemical structure] | sequence expressed in transgenic mouse (The italicized portion represents the cytoplasmic domain, the bolded portion represents the transmembrane domain, the portion in grey represents the extracellular domain, and the bold and underlined portion represents the apical domain) |
| 397 | GCTCAGAACTCCGTGATCATCGTGGATAAGAACGGCCGGCTGGT | DNA sequence of human |
| | GTACCTGGTGGAGAACCCTGGCGGATACGTGGCTTACTCTAAGG | apical domain insert |
| | CCGCTACCGTGACAGGCAAGCTGGTGCACGCCAACTTCGGAACC | |
| | AAGAAGGACTTTGAGGATCTGTACACACCAGTGAACGGCTCTAT | |
| | CGTGATCGTGCGCGCTGGAAAGATCACCTTCGCCGAGAAGGTGG | |
| | CTAACGCCGAGAGCCTGAACGCCATCGGCGTGCTGATCTACATG | |
| | GATCAGACAAAGTTTCCCATCGTGAACGCTGAGCTGTCTTTCTTT | |
| | GGACACGCTCACCTGGGCACCGGAGACCCATACACACCCGGATT | |
| | CCCTAGCTTTAACCACACCCAGTTCCCCCCTTCCAGGTCTAGCGG | |
| | ACTGCCAAACATCCCCGTGCAGACAATCAGCAGAGCCGCTGCCG | |
| | AGAAGCTGTTTGGCAACATGGAGGGAGACTGCCCCTCCGATTGG | |
| | AAGACCGACTCTACATGTAGGATGGTGACCTCCGAGTCAAAAAA | |
| 398 | [sequence omitted] | full-length human Tau |
| | KESPLQTPTEDGSEEPGSETSDAKSTPTAEAEEAGIGDTPSLEDEAAG | (Tau412; 1N4R) |
| | HVTQARMVSKSKDGTGSDDKKAKGADGKTKIATPRGAAPPGQKG | |
| | QANATRIPAKTPPAPKTPPSSGEPPKSGDRSGYSSPGSPGTPGSRSRTP | |
| | SLPTPPTREPKKVAVVRTPPKSPSSAKSRLQTAPVPMPDLKNVKSKI | |
| | GSTENLKHQPGGGKVQIINKKLDLSNVQSKCGSKDNIKHVPGGGSV | |
| | QIVYKPVDLSKVTSKCGSLGNIHHKPGGGQVEVKSEKLDFKDRVQS | |
| | KIGSLDNITHVPGGGNKKIETHKLTFRENAKAKTDHGAEIVYKSPVV | |
| | SGDTSPRHLSNVSSTGSIDMVDSPQLATLADEVSASLAKQGL | |

The application's sequence listing, which the Patent Office published only in electronic form, follows.

SEQUENCE LISTING (575 sequences)

SEQ ID NO: 1 - protein, 217 aa, Homo sapiens
APELLGGPSVFLFPPKPKDTLMISRTPEVTCVVVDVSHEDPEVKFNWYVDGVEVHNAKTKPREEQYNSTYRVVSVLTVLHQDWLNGKEYKCKVSNKALPAPIEKTISKAKGQPREPQVYTLPPSRDELTKNQVSLTCLVKGFYPSDIAVEWESNGQPENNYKTTPPVLDSDGSFFLYSKLTVDKSRWQQGNVFSCSVMHEALHNHYTQKSLSLSPGK

SEQ ID NO: 2 - protein, 110 aa, Homo sapiens
APELLGGPSVFLFPPKPKDTLMISRTPEVTCVVVDVSHEDPEVKFNWYVDGVEVHNAKTKPREEQYNSTYRVVSVLTVLHQDWLNGKEYKCKVSNKALPAPIEKTISKAK

SEQ ID NO: 3 - protein, 107 aa, Homo sapiens
GQPREPQVYTLPPSRDELTKNQVSLTCLVKGFYPSDIAVEWESNGQPENNYKTTPPVLDSDGSFFLYSKLTVDKSRWQQGNVFSCSVMHEALHNHYTQKSLSLSPGK

SEQ ID NO: 4 - protein, 217 aa, Artificial Sequence
  Description of Artificial Sequence: Synthetic polypeptide
APELLGGPSVFLFPPKPKDTLMISRTPEVTCVVVDVSHEDPEVKFNWYVDGVEVHNAKTKPREEQYNSTYRVVSVLTVLHQDWLNGKEYKCKVSNKALPAPIEKTISKAKGQPREPQVYTLPPSRDELTKNQVSLTCLVKGFYPSDIAVEWESLGLVWVGYKTTPPVLDSDGSFFLYSKLTVAKSTWQQGWVFSCSVMHEALHNHYTQKSLSLSPGK

SEQ ID NO: 5 - protein, 217 aa, Artificial Sequence
  Description of Artificial Sequence: Synthetic polypeptide
APELLGGPSVFLFPPKPKDTLMISRTPEVTCVVVDVSHEDPEVKFNWYVDGVEVHNAKTKPREEQYNSTYRVVSVLTVLHQDWLNGKEYKCKVSNKALPAPIEKTISKAKGQPREPQVYTLPPSRDELTKNQVSLTCLVKGFYPSDIAVEWESYGTVWSHYKTTPPVLDSDGSFFLYSKLTVSKSEWQQGYVFSCSVMHEALHNHYTQKSLSLSPGK

SEQ ID NO: 6 - protein, 217 aa, Artificial Sequence
  Description of Artificial Sequence: Synthetic polypeptide
APELLGGPSVFLFPPKPKDTLMISRTPEVTCVVVDVSHEDPEVKFNWYVDGVEVHNAKTKPREEQYNSTYRVVSVLTVLHQDWLNGKEYKCKVSNKALPAPIEKTISKAKGQPREPQVYTLPPSRDELTKNQVSLTCLVKGFYPSDIAVEWESYGTEWSQYKTTPPVLDSDGSFFLYSKLTVEKSDWQQGHVFSCSVMHEALHNHYTQKSLSLSPGK

SEQ ID NO: 7 - protein, 217 aa, Artificial Sequence
  Description of Artificial Sequence: Synthetic polypeptide
APELLGGPSVFLFPPKPKDTLMISRTPEVTCVVVDVSHEDPEVKFNWYVDGVEVHNAKTKPREEQYNSTYRVVSVLTVLHQDWLNGKEYKCKVSNKALPAPIEKTISKAKGQPREPQVYTLPPSRDELTKNQVSLTCLVKGFYPSDIAVEWESVGTPWALYKTTPPVLDSDGSFFLYSKLTVLKSEWQQGWVFSCSVMHEALHNHYTQKSLSLSPGK

SEQ ID NO: 8 - protein, 217 aa, Artificial Sequence
  Description of Artificial Sequence: Synthetic polypeptide
APELLGGPSVFLFPPKPKDTLMISRTPEVTCVVVDVSHEDPEVKFNWYVDGVEVHNAKTKPREEQYNSTYRVVSVLTVLHQDWLNGKEYKCKVSNKALPAPIEKTISKAKGQPREPQVYTLPPSRDELTKNQVSLTCLVKGFYPSDIAVEWESYGTVWSKYKTTPPVLDSDGSFFLYSKLTVSKSEWQQGFVFSCSVMHEALHNHYTQKSLSLSPGK

SEQ ID NO: 9 - protein, 217 aa, Artificial Sequence
  Description of Artificial Sequence: Synthetic polypeptide
APELLGGPSVFLFPPKPKDTLMISRTPEVTCVVVDVSHEDPEVKFNWYVDGVEVHNAKTKPREEQYNSTYRVVSVLTVLHQDWLNGKEYKCKVSNKALPAPIEKTISKAKGQPREPQVYTLPPSRDELTKNQVSLTCLVKGFYPSDIAVEWESLGHVWAVYKTTPPVLDSDGSFFLYSKLTVPKSTWQQGWVFSCSVMHEALHNHYTQKSLSLSPGK

SEQ ID NO: 10 - protein, 217 aa, Artificial Sequence
  Description of Artificial Sequence: Synthetic polypeptide
APELLGGPSVFLFPPKPKDTLMISRTPEVTCVVVDVSHEDPEVKFNWYVDGVEVHNAKTKPREEQYNSTYRVVSVLTVLHQDWLNGKEYKCKVSNKALPAPIEKTISKAKGQPREPQVYTLPPSRDELTKNQVSLTCLVKGFYPSDIAVEWESLGLVWVGYKTTPPVLDSDGSFFLYSKLTVPKSTWQQGWVFSCSVMHEALHNHYTQKSLSLSPGK

SEQ ID NO: 11 - protein, 217 aa, Artificial Sequence
  Description of Artificial Sequence: Synthetic polypeptide
APELLGGPSVFLFPPKPKDTLMISRTPEVTCVVVDVSHEDPEVKFNWYVDGVEVHNAKTKPREEQYNSTYRVVSVLTVLHQDWLNGKEYKCKVSNKALPAPIEKTISKAKGQPREPQVYTLPPSRDELTKNQVSLTCLVKGFYPSDIAVEWESMGHVWVGYKTTPPVLDSDGSFFLYSKLTVDKSTWQQGWVFSCSVMHEALHNHYTQKSLSLSPGK

SEQ ID NO: 12 - protein, 217 aa, Artificial Sequence
  Description of Artificial Sequence: Synthetic polypeptide
APELLGGPSVFLFPPKPKDTLMISRTPEVTCVVVDVSHEDPEVKFNWYVDGVEVHNAKTKPREEQYNSTYRVVSVLTVLHQDWLNGKEYKCKVSNKALPAPIEKTISKAKGQPREPQVYTLPPSRDELTKNQVSLTCLVKGFYPSDIAVEWESLGLVWVFSKTTPPVLDSDGSFFLYSKLTVPKSTWQQGWVFSCSVMHEALHNHYTQKSLSLSPGK

SEQ ID NO: 13 - protein, 217 aa, Artificial Sequence
  Description of Artificial Sequence: Synthetic polypeptide
APELLGGPSVFLFPPKPKDTLMISRTPEVTCVVVDVSHEDPEVKFNWYVDGVEVHNAKTKPREEQYNSTYRVVSVLTVLHQDWLNGKEYKCKVSNKALPAPIEKTISKAKGQPREPQVYTLPPSRDELTKNQVSLTCLVKGFYPSDIAVEWESYGTEWSSYKTTPPVLDSDGSFFLYSKLTVTKSEWQQGFVFSCSVMHEALHNHYTQKSLSLSPGK

SEQ ID NO: 14 - protein, 217 aa, Artificial Sequence
  Description of Artificial Sequence: Synthetic polypeptide
APELLGGPSVFLFPPKPKDTLMISRTPEVTCVVVDVSHEDPEVKFNWYVDGVEVHNAKTKPREEQYNSTYRVVSVLTVLHQDWLNGKEYKCKVSNKALPAPIEKTISKAKGQPREPQVYTLPPSRDELTKNQVSLTCLVKGFYPSDIAVEWESYGTEWSNYKTTPPVLDSDGSFFLYSKLTVSKSEWQQGFVFSCSVMHEALHNHYTQKSLSLSPGK

SEQ ID NO: 15 - protein, 217 aa, Artificial Sequence
  Description of Artificial Sequence: Synthetic polypeptide
APELLGGPSVFLFPPKPKDTLMISRTPEVTCVVVDVSHEDPEVKFNWYVDGVEVHNAKTKPREEQYNSTYRVVSVLTVLHQDWLNGKEYKCKVSNKALPAPIEKTISKAKGQPREPQVYTLPPSRDELTKNQVSLTCLVKGFYPSDIAVEWESLGHVWVGYKTTPPVLDSDGSFFLYSKLTVSKSEWQQGWVFSCSVMHEALHNHYTQKSLSLSPGK

SEQ ID NO: 16 - protein, 217 aa, Artificial Sequence
  Description of Artificial Sequence: Synthetic polypeptide
APELLGGPSVFLFPPKPKDTLMISRTPEVTCVVVDVSHEDPEVKFNWYVDGVEVHNAKTKPREEQYNSTYRVVSVLTVLHQDWLNGKEYKCKVSNKALPAPIEKTISKAKGQPREPQVYTLPPSRDELTKNQVSLTCLVKGFYPSDIAVEWESLGHVWVATKTTPPVLDSDGSFFLYSKLTVPKSTWQQGWVFSCSVMHEALHNHYTQKSLSLSPGK

SEQ ID NO: 17 - protein, 217 aa, Artificial Sequence
  Description of Artificial Sequence: Synthetic polypeptide
APELLGGPSVFLFPPKPKDTLMISRTPEVTCVVVDVSHEDPEVKFNWYVDGVEVHNAKTKPREEQYNSTYRVVSVLTVLHQDWLNGKEYKCKVSNKALPAPIEKTISKAKGQPREPQVYTLPPSRDELTKNQVSLTCLVKGFYPSDIAVEWESLGPVWVHTKTTPPVLDSDGSFFLYSKLTVPKSTWQQGWVFSCSVMHEALHNHYTQKSLSLSPGK

SEQ ID NO: 18 - protein, 217 aa, Artificial Sequence
  Description of Artificial Sequence: Synthetic polypeptide
APELLGGPSVFLFPPKPKDTLMISRTPEVTCVVVDVSHEDPEVKFNWYVDGVEVHNAKTKPREEQYNSTYRVVSVLTVLHQDWLNGKEYKCKVSNKALPAPIEKTISKAKGQPREPQVYTLPPSRDELTKNQVSLTCLVKGFYPSDIAVEWESLGHVWVDQKTTPPVLDSDGSFFLYSKLTVPKSTWQQGWVFSCSVMHEALHNHYTQKSLSLSPGK

SEQ ID NO: 19 - protein, 217 aa, Artificial Sequence
  Description of Artificial Sequence: Synthetic polypeptide
APELLGGPSVFLFPPKPKDTLMISRTPEVTCVVVDVSHEDPEVKFNWYVDGVEVHNAKTKPREEQYNSTYRVVSVLTVLHQDWLNGKEYKCKVSNKALPAPIEKTISKAKGQPREPQVYTLPPSRDELTKNQVSLTCLVKGFYPSDIAVEWESLGHVWVNQKTTPPVLDSDGSFFLYSKLTVPKSTWQQGWVFSCSVMHEALHNHYTQKSLSLSPGK

SEQ ID NO: 20 - protein, 217 aa, Artificial Sequence
  Description of Artificial Sequence: Synthetic polypeptide
APELLGGPSVFLFPPKPKDTLMISRTPEVTCVVVDVSHEDPEVKFNWYVDGVEVHNAKTKPREEQYNSTYRVVSVLTVLHQDWLNGKEYKCKVSNKALPAPIEKTISKAKGQPREPQVYTLPPSRDELTKNQVSLTCLVKGFYPSDIAVEWESLGHVWVNFKTTPPVLDSDGSFFLYSKLTVPKSTWQQGWVFSCSVMHEALHNHYTQKSLSLSPGK

SEQ ID NO: 21 - protein, 217 aa, Artificial Sequence
  Description of Artificial Sequence: Synthetic polypeptide
APELLGGPSVFLFPPKPKDTLMISRTPEVTCVVVDVSHEDPEVKFNWYVDGVEVHNAKTKPREEQYNSTYRVVSVLTVLHQDWLNGKEYKCKVSNKALPAPIEKTISKAKGQPREPQVYTLPPSRDELTKNQVSLTCLVKGFYPSDIAVWWESLGHVWAVYKTTPPVLDSDGSFFLYSKLTVPKSTWQQGWVFSCSVMHEALHNHYTQKSLSLSPGK

SEQ ID NO: 22 - protein, 217 aa, Artificial Sequence
  Description of Artificial Sequence: Synthetic polypeptide
APELLGGPSVFLFPPKPKDTLMISRTPEVTCVVVDVSHEDPEVKFNWYVDGVEVHNAKTKPREEQYNSTYRVVSVLTVLHQDWLNGKEYKCKVSNKALPAPIEKTISKAKGQPREPQVYTLPPSRDELTKNQVSLTCLVKGFYPSDIAVEWESLGHVWAVYQTTPPVLDSDGSFFLYSKLTVPKSTWQQGWVFSCSVMHEALHNHYTQKSLSLSPGK

SEQ ID NO: 23 - protein, 217 aa, Artificial Sequence
  Description of Artificial Sequence: Synthetic polypeptide
APELLGGPSVFLFPPKPKDTLMISRTPEVTCVVVDVSHEDPEVKFNWYVDGVEVHNAKTKPREEQYNSTYRVVSVLTVLHQDWLNGKEYKCKVSNKALPAPIEKTISKAKGQPREPQVYTLPPSRDELTKNQVSLTCLVKGFYPSDIAVWWESLGHVWAVYQTTPPVLDSDGSFFLYSKLTVPKSTWQQGWVFSCSVMHEALHNHYTQKSLSLSPGK

SEQ ID NO: 24 - protein, 217 aa, Artificial Sequence
  Description of Artificial Sequence: Synthetic polypeptide
APELLGGPSVFLFPPKPKDTLMISRTPEVTCVVVDVSHEDPEVKFNWYVDGVEVHNAKTKPREEQYNSTYRVVSVLTVLHQDWLNGKEYKCKVSNKALPAPIEKTISKAKGQPREPQVYTLPPSRDELTKNQVSLTCLVKGFYPSDIAVWWESYGTEWSSYKTTPPVLDSDGSFFLYSKLTVTKSEWQQGFVFSCSVMHEALHNHYTQKSLSLSPGK

SEQ ID NO: 25 - protein, 217 aa, Artificial Sequence
  Description of Artificial Sequence: Synthetic polypeptide
APELLGGPSVFLFPPKPKDTLMISRTPEVTCVVVDVSHEDPEVKFNWYVDGVEVHNAKTKPREEQYNSTYRVVSVLTVLHQDWLNGKEYKCKVSNKALPAPIEKTISKAKGQPREPQVYTLPPSRDELTKNQVSLTCLVKGFYPSDIAVEWESYGTEWSSYKTTPPVLDSDGSFFLYSKLTVTKEEWQQGFVFSCSVMHEALHNHYTQKSLSLSPGK

SEQ ID NO: 26 - protein, 217 aa, Artificial Sequence
  Description of Artificial Sequence: Synthetic polypeptide
APELLGGPSVFLFPPKPKDTLMISRTPEVTCVVVDVSHEDPEVKFNWYVDGVEVHNAKTKPREEQYNSTYRVVSVLTVLHQDWLNGKEYKCKVSNKALPAPIEKTISKAKGQPREPQVYTLPPSRDELTKNQVSLTCLVKGFYPSDIAVWWESYGTEWSSYKTTPPVLDSDGSFFLYSKLTVTKEEWQQGFVFSCSVMHEALHNHYTQKSLSLSPGK

SEQ ID NO: 27 - protein, 217 aa, Artificial Sequence
  Description of Artificial Sequence: Synthetic polypeptide
APELLGGPSVFLFPPKPKDTLMISRTPEVTCVVVDVSHEDPEVKFNWYVDGVEVHNAKTKPREEQYNSTYRVVSVLTVLHQDWLNGKEYKCKVSNKALPAPIEKTISKAKGQPREPQVYTLPPSRDELTKNQVSLTCLVKGFYPSDIAVEWESYGTEWSNYKTTPPVLDSDGSFFLYSKLTVTKSEWQQGFVFSCSVMHEALHNHYTQKSLSLSPGK

SEQ ID NO: 28 - protein, 217 aa, Artificial Sequence
  Description of Artificial Sequence: Synthetic polypeptide
APELLGGPSVFLFPPKPKDTLMISRTPEVTCVVVDVSHEDPEVKFNWYVDGVEVHNAKTKPREEQYNSTYRVVSVLTVLHQDWLNGKEYKCKVSNKALPAPIEKTISKAKGQPREPQVYTLPPSRDELTKNQVSLTCLVKGFYPSDIAVEWESYGTEWSSYQTTPPVLDSDGSFFLYSKLTVTKSEWQQGFVFSCSVMHEALHNHYTQKSLSLSPGK

SEQ ID NO: 29 - protein, 217 aa, Artificial Sequence
  Description of Artificial Sequence: Synthetic polypeptide
APELLGGPSVFLFPPKPKDTLMISRTPEVTCVVVDVSHEDPEVKFNWYVDGVEVHNAKTKPREEQYNSTYRVVSVLTVLHQDWLNGKEYKCKVSNKALPAPIEKTISKAKGQPREPQVYTLPPSRDELTKNQVSLTCLVKGFYPSDIAVEWESYGTEWSNYQTTPPVLDSDGSFFLYSKLTVTKSEWQQGFVFSCSVMHEALHNHYTQKSLSLSPGK

SEQ ID NO: 30 - protein, 217 aa, Artificial Sequence
  Description of Artificial Sequence: Synthetic polypeptide
APELLGGPSVFLFPPKPKDTLMISRTPEVTCVVVDVSHEDPEVKFNWYVDGVEVHNAKTKPREEQYNSTYRVVSVLTVLHQDWLNGKEYKCKVSNKALPAPIEKTISKAKGQPRFDYVTTLPPSRDELTKNQVSLTCLVKGFYPSDIAVEWESNGQPENNYKTTPPVLDSDGSFFLYSKLTVDKSRWQQGNVFSCSVMHEALHNHYGFHDLSLSPGK

SEQ ID NO: 31 - protein, 217 aa, Artificial Sequence
  Description of Artificial Sequence: Synthetic polypeptide
APELLGGPSVFLFPPKPKDTLMISRTPEVTCVVVDVSHEDPEVKFNWYVDGVEVHNAKTKPREEQYNSTYRVVSVLTVLHQDWLNGKEYKCKVSNKALPAPIEKTISKAKGQPRFDMVTTLPPSRDELTKNQVSLTCLVKGFYPSDIAVEWESNGQPENNYKTTPPVLDSDGSFFLYSKLTVDKSRWQQGNVFSCSVMHEALHNHYGFHDLSLSPGK

SEQ ID NO: 32 - protein, 217 aa, Artificial Sequence
  Description of Artificial Sequence: Synthetic polypeptide
APELLGGPSVFLFPPKPKDTLMISRTPEVTCVVVDVSHEDPEVKFNWYVDGVEVHNAKTKPREEQYNSTYRVVSVLTVLHQDWLNGKEYKCKVSNKALPAPIEKTISKAKGQPRFEYVTTLPPSRDELTKNQVSLTCLVKGFYPSDIAVEWESNGQPENNYKTTPPVLDSDGSFFLYSKLTVDKSRWQQGNVFSCSVMHEALHNHYGFHDLSLSPGK

SEQ ID NO: 33 - protein, 217 aa, Artificial Sequence
  Description of Artificial Sequence: Synthetic polypeptide
APELLGGPSVFLFPPKPKDTLMISRTPEVTCVVVDVSHEDPEVKFNWYVDGVEVHNAKTKPREEQYNSTYRVVSVLTVLHQDWLNGKEYKCKVSNKALPAPIEKTISKAKGQPRFEMVTTLPPSRDELTKNQVSLTCLVKGFYPSDIAVEWESNGQPENNYKTTPPVLDSDGSFFLYSKLTVDKSRWQQGNVFSCSVMHEALHNHYGFHDLSLSPGK

SEQ ID NO: 34 - protein, 217 aa, Artificial Sequence
  Description of Artificial Sequence: Synthetic polypeptide
APELLGGPSVFLFPPKPKDTLMISRTPEVTCVVVDVSHEDPEVKFNWYVDGVEVHNAKTKPREEQYNSTYRVVSVLTVLHQDWLNGKEYKCKVSNKALPAPIEKTISKAKGQPRFELVTTLPPSRDELTKNQVSLTCLVKGFYPSDIAVEWESNGQPENNYKTTPPVLDSDGSFFLYSKLTVDKSRWQQGNVFSCSVMHEALHNHYGFHDLSLSPGK

SEQ ID NO: 35 - protein, 217 aa, Artificial Sequence
  Description of Artificial Sequence: Synthetic polypeptide
APELLGGPSVFLFPPKPKDTLMISRTPEVTCVVVDVSHEDPEVKFNWYVDGVEVHNAKTKPREEQYNSTYRVVSVLTVLHQDWLNGKEYKCKVSNKALPAPIEKTISKAKGQPRFEIVTTLPPSRDELTKNQVSLTCLVKGFYPSDIAVEWESNGQPENNYKTTPPVLDSDGSFFLYSKLTVDKSRWQQGNVFSCSVMHEALHNHYGFHDLSLSPGK

SEQ ID NO: 36 - protein, 217 aa, Artificial Sequence
  Description of Artificial Sequence: Synthetic polypeptide
APELLGGPSVFLFPPKPKDTLMISRTPEVTCVVVDVSHEDPEVKFNWYVDGVEVHNAKTKPREEQYNSTYRVVSVLTVLHQDWLNGKEYKCKVSNKALPAPIEKTISKAKGQPRFDIVTTLPPSRDELTKNQVSLTCLVKGFYPSDIAVEWESNGQPENNYKTTPPVLDSDGSFFLYSKLTVDKSRWQQGNVFSCSVMHEALHNHYGFHDLSLSPGK

SEQ ID NO: 37 - protein, 217 aa, Artificial Sequence
  Description of Artificial Sequence: Synthetic polypeptide
APELLGGPSVFLFPPKPKDTLMISRTPEVTCVVVDVSHEDPEVKFNWYVDGVEVHNAKTKPREEQYNSTYRVVSVLTVLHQDWLNGKEYKCKVSNKALPAPIEKTISKAKGQPRFDYVYTLPPSRDELTKNQVSLTCLVKGFYPSDIAVEWESNGQPENNYKTTPPVLDSDGSFFLYSKLTVDKSRWQQGNVFSCSVMHEALHNHYGFHDLSLSPGK

SEQ ID NO: 38 - protein, 217 aa, Artificial Sequence
  Description of Artificial Sequence: Synthetic polypeptide
APELLGGPSVFLFPPKPKDTLMISRTPEVTCVVVDVSHEDPEVKFNWYVDGVEVHNAKTKPREEQYNSTYRVVSVLTVLHQDWLNGKEYKCKVSNKALPAPIEKTISKAKGQPRFGMVTTLPPSRDELTKNQVSLTCLVKGFYPSDIAVEWESNGQPENNYKTTPPVLDSDGSFFLYSKLTVDKSRWQQGNVFSCSVMHEALHNHYGFHDLSLSPGK

SEQ ID NO: 39 - protein, 217 aa, Artificial Sequence
  Description of Artificial Sequence: Synthetic polypeptide
APELLGGPSVFLFPPKPKDTLMISRTPEVTCVVVDVSHEDPEVKFNWYVDGVEVHNAKTKPREEQYNSTYRVVSVLTVLHQDWLNGKEYKCKVSNKALPAPIEKTISKAKGQPRFADVTILPPSRDELTKNQVSLTCLVKGFYPSDIAVEWESNGQPENNYKTTPPVLDSDGSFFLYSKLTVDKSRWQQGNVFSCSVMHEALHNHYGFYDLSLSPGK

SEQ ID NO: 40 - protein, 217 aa, Artificial Sequence
  Description of Artificial Sequence: Synthetic polypeptide
APELLGGPSVFLFPPKPKDTLMISRTPEVTCVVVDVSHEDPEVKFNWYVDGVEVHNAKTKPREEQYNSTYRVVSVLTVLHQDWLNGKEYKCKVSNKALPAPIEKTISKAKGQPRFGLVTTLPPSRDELTKNQVSLTCLVKGFYPSDIAVEWESNGQPENNYKTTPPVLDSDGSFFLYSKLTVDKSRWQQGNVFSCSVMHEALHNHYGFHDLSLSPGK

SEQ ID NO: 41 - protein, 217 aa, Artificial Sequence
  Description of Artificial Sequence: Synthetic polypeptide
APELLGGPSVFLFPPKPKDTLMISRTPEVTCVVVDVSHEDPEVKFNWYVDGVEVHNAKTKPREEQYNSTYRVVSVLTVLHQDWLNGKEYKCKVSNKALPAPIEKTISKAKGQPRFDYVTTLPPSRDELTKNQVSLTCLVKGFYPSDIAVEWESNGQPENNYKTTPPVLDSDGSFFLYSKLTVDKSRWQQGNVFSCSVMHEALHNHYGFSDLSLSPGK

SEQ ID NO: 42 - protein, 217 aa, Artificial Sequence
  Description of Artificial Sequence: Synthetic polypeptide
APELLGGPSVFLFPPKPKDTLMISRTPEVTCVVVDVSHEDPEVKFNWYVDGVEVHNAKTKPREEQYNSTYRVVSVLTVLHQDWLNGKEYKCKVSNKALPAPIEKTISKAKGQPRIDYVTTLPPSRDELTKNQVSLTCLVKGFYPSDIAVEWESNGQPENNYKTTPPVLDSDGSFFLYSKLTVDKSRWQQGNVFSCSVMHEALHNHYGFSDLSLSPGK

SEQ ID NO: 43 - protein, 217 aa, Artificial Sequence
  Description of Artificial Sequence: Synthetic polypeptide
APELLGGPSVFLFPPKPKDTLMISRTPEVTCVVVDVSHEDPEVKFNWYVDGVEVHNAKTKPREEQYNSTYRVVSVLTVLHQDWLNGKEYKCKVSNKALPAPIEKTISKAKGQPRFKDVTILPPSRDELTKNQVSLTCLVKGFYPSDIAVEWESNGQPENNYKTTPPVLDSDGSFFLYSKLTVDKSRWQQGNVFSCSVMHEALHNHYGFFDLSLSPGK

SEQ ID NO: 44 - protein, 217 aa, Artificial Sequence
  Description of Artificial Sequence: Synthetic polypeptide
APELLGGPSVFLFPPKPKDTLMISRTPEVTCVVVDVSHEDPEVKFNWYVDGVEVHNAKTKPREEQYNSTYRVVSVLTVLHQDWLNGKEYKCKVSNKALPAPIEKTISKAKGQPRFDLVTILPPSRDELTKNQVSLTCLVKGFYPSDIAVEWESNGQPENNYKTTPPVLDSDGSFFLYSKLTVDKSRWQQGNVFSCSVMHEALHNHYGFYDLSLSPGK

SEQ ID NO: 45 - protein, 217 aa, Artificial Sequence; identical to SEQ ID NO: 42
  Description of Artificial Sequence: Synthetic polypeptide

SEQ ID NO: 46 - protein, 217 aa, Artificial Sequence
  Description of Artificial Sequence: Synthetic polypeptide
APELLGGPSVFLFPPKPKDTLMISRTPEVTCVVVDVSHEDPEVKFNWYVDGVEVHNAKTKPREEQYNSTYRVVSVLTVLHQDWLNGKEYKCKVSNKALPAPIEKTISKAKGQPRFELVATLPPSRDELTKNQVSLTCLVKGFYPSDIAVEWESNGQPENNYKTTPPVLDSDGSFFLYSKLTVDKSRWQQGNVFSCSVMHEALHNHYGFHDLSLSPGK

SEQ ID NO: 47 - protein, 217 aa, Artificial Sequence
  Description of Artificial Sequence: Synthetic polypeptide
APELLGGPSVFLFPPKPKDTLMISRTPEVTCVVVDVSHEDPEVEFIWYVDGVDVRYEWQLPREEQYNSTYRVVSVLTVLHQDWLNGKEYKCKVSNKALPAPIEKTISKAKGQPREPQVYTLPPSRDELTKNQVSLTCLVKGFYPSDIAVEWESNGQPENNYKTTPPVLDSDGSFFLYSKLTVDKSRWQQGNVFSCSVMHEALHNHYTQKSLSLSPGK

SEQ ID NO: 48 - protein, 217 aa, Artificial Sequence
  Description of Artificial Sequence: Synthetic polypeptide
APELLGGPSVFLFPPKPKDTLMISRTPEVTCVVVDVSHEDPEVGFVWYVDGVPVSWEWYWPREEQYNSTYRVVSVLTVLHQDWLNGKEYKCKVSNKALPAPIEKTISKAKGQPREPQVYTLPPSRDELTKNQVSLTCLVKGFYPSDIAVEWESNGQPENNYKTTPPVLDSDGSFFLYSKLTVDKSRWQQGNVFSCSVMHEALHNHYTQKSLSLSPGK

SEQ ID NO: 49 - protein, 217 aa, Artificial Sequence
  Description of Artificial Sequence: Synthetic polypeptide
APELLGGPSVFLFPPKPKDTLMISRTPEVTCVVVDVSHEDPEVQFDWYVDGVMVRREWHRPREEQYNSTYRVVSVLTVLHQDWLNGKEYKCKVSNKALPAPIEKTISKAKGQPREPQVYTLPPSRDELTKNQVSLTCLVKGFYPSDIAVEWESNGQPENNYKTTPPVLDSDGSFFLYSKLTVDKSRWQQGNVFSCSVMHEALHNHYTQKSLSLSPGK

SEQ ID NO: 50 - protein, 217 aa, Artificial Sequence
  Description of Artificial Sequence: Synthetic polypeptide
APELLGGPSVFLFPPKPKDTLMISRTPEVTCVVVDVSHEDPEVSFEWYVDGVPVRWEWQWPREEQYNSTYRVVSVLTVLHQDWLNGKEYKCKVSNKALPAPIEKTISKAKGQPREPQVYTLPPSRDELTKNQVSLTCLVKGFYPSDIAVEWESNGQPENNYKTTPPVLDSDGSFFLYSKLTVDKSRWQQGNVFSCSVMHEALHNHYTQKSLSLSPGK

SEQ ID NO: 51 - protein, 217 aa, Artificial Sequence
  Description of Artificial Sequence: Synthetic polypeptide
APELLGGPSVFLFPPKPKDTLMISRTPEVTCVVVDVSHEDPEVAFTWYVDGVPVRWEWQNPREEQYNSTYRVVSVLTVLHQDWLNGKEYKCKVSNKALPAPIEKTISKAKGQPREPQVYTLPPSRDELTKNQVSLTCLVKGFYPSDIAVEWESNGQPENNYKTTPPVLDSDGSFFLYSKLTVDKSRWQQGNVFSCSVMHEALHNHYTQKSLSLSPGK

SEQ ID NO: 52 - protein, 217 aa, Artificial Sequence
  Description of Artificial Sequence: Synthetic polypeptide
APELLGGPSVFLFPPKPKDTLMISRTPEVTCVVVDVSHEDPEVNFDWYVDGVLVRREWHRPREEQYNSTYRVVSVLTVLHQDWLNGKEYKCKVSNKALPAPIEKTISKAKGQPREPQVYTLPPSRDELTKNQVSLTCLVKGFYPSDIAVEWESNGQPENNYKTTPPVLDSDGSFFLYSKLTVDKSRWQQGNVFSCSVMHEALHNHYTQKSLSLSPGK

SEQ ID NO: 53 - protein, 217 aa, Artificial Sequence
  Description of Artificial Sequence: Synthetic polypeptide
APELLGGPSVFLFPPKPKDTLMISRTPEVTCVVVDVSHEDPEVQFVWYVDGVAVRWEWIRPREEQYNSTYRVVSVLTVLHQDWLNGKEYKCKVSNKALPAPIEKTISKAKGQPREPQVYTLPPSRDELTKNQVSLTCLVKGFYPSDIAVEWESNGQPENNYKTTPPVLDSDGSFFLYSKLTVDKSRWQQGNVFSCSVMHEALHNHYTQKSLSLSPGK

SEQ ID NO: 54 - protein, 217 aa, Artificial Sequence
  Description of Artificial Sequence: Synthetic polypeptide
APELLGGPSVFLFPPKPKDTLMISRTPEVTCVVVDVSHEDPEVEFIWYVDGVEVAWEWFWPREEQYNSTYRVVSVLTVLHQDWLNGKEYKCKVSNKALPAPIEKTISKAKGQPREPQVYTLPPSRDELTKNQVSLTCLVKGFYPSDIAVEWESNGQPENNYKTTPPVLDSDGSFFLYSKLTVDKSRWQQGNVFSCSVMHEALHNHYTQKSLSLSPGK

SEQ ID NO: 55 - protein, 217 aa, Artificial Sequence
  Description of Artificial Sequence: Synthetic polypeptide
APELLGGPSVFLFPPKPKDTLMISRTPEVTCVVVDVSHEDPEVGFAWYVDGVNVRVEWQYPREEQYNSTYRVVSVLTVLHQDWLNGKEYKCKVSNKALPAPIEKTISKAKGQPREPQVYTLPPSRDELTKNQVSLTCLVKGFYPSDIAVEWESNGQPENNYKTTPPVLDSDGSFFLYSKLTVDKSRWQQGNVFSCSVMHEALHNHYTQKSLSLSPGK

SEQ ID NO: 56 - protein, 217 aa, Artificial Sequence
  Description of Artificial Sequence: Synthetic polypeptide
APELLGGPSVFLFPPKPKDTLMISRTPEVTCVVVDVSHEDPEVGFVWYVDGVEVRREWVRPREEQYNSTYRVVSVLTVLHQDWLNGKEYKCKVSNKALPAPIEKTISKAKGQPREPQVYTLPPSRDELTKNQVSLTCLVKGFYPSDIAVEWESNGQPENNYKTTPPVLDSDGSFFLYSKLTVDKSRWQQGNVFSCSVMHEALHNHYTQKSLSLSPGK

SEQ ID NO: 57 - protein, 217 aa, Artificial Sequence
  Description of Artificial Sequence: Synthetic polypeptide
APELLGGPSVFLFPPKPKDTLMISRTPEVTCVVVDVSHEDPEVSFDWYVDGVLVRREWQRPREEQYNSTYRVVSVLTVLHQDWLNGKEYKCKVSNKALPAPIEKTISKAKGQPREPQVYTLPPSRDELTKNQVSLTCLVKGFYPSDIAVEWESNGQPENNYKTTPPVLDSDGSFFLYSKLTVDKSRWQQGNVFSCSVMHEALHNHYTQKSLSLSPGK

SEQ ID NO: 58 - protein, 217 aa, Artificial Sequence
  Description of Artificial Sequence: Synthetic polypeptide
APELLGGPSVFLFPPKPKDTLMISRTPEVTCVVVDVSHEDPEVEFTWYVDGVDVRYEWYYPREEQYNSTYRVVSVLTVLHQDWLNGKEYKCKVSNKALPAPIEKTISKAKGQPREPQVYTLPPSRDELTKNQVSLTCLVKGFYPSDIAVEWESNGQPENNYKTTPPVLDSDGSFFLYSKLTVDKSRWQQGNVFSCSVMHEALHNHYTQKSLSLSPGK

SEQ ID NO: 59 - protein, 217 aa, Artificial Sequence
  Description of Artificial Sequence: Synthetic polypeptide
APELLGGPSVFLFPPKPKDTLMISRTPEVTCVVVDVSHEDPEVQFTWYVDGVDVRYEWVRPREEQYNSTYRVVSVLTVLHQDWLNGKEYKCKVSNKALPAPIEKTISKAKGQPREPQVYTLPPSRDELTKNQVSLTCLVKGFYPSDIAVEWESNGQPENNYKTTPPVLDSDGSFFLYSKLTVDKSRWQQGNVFSCSVMHEALHNHYTQKSLSLSPGK

SEQ ID NO: 60 - protein, 217 aa, Artificial Sequence
  Description of Artificial Sequence: Synthetic polypeptide
APELLGGPSVFLFPPKPKDTLMISRTPEVTCVVVDVSHEDPEVQFYWYVDGVNVRREWHRPREEQYNSTYRVVSVLTVLHQDWLNGKEYKCKVSNKALPAPIEKTISKAKGQPREPQVYTLPPSRDELTKNQVSLTCLVKGFYPSDIAVEWESNGQPENNYKTTPPVLDSDGSFFLYSKLTVDKSRWQQGNVFSCSVMHEALHNHYTQKSLSLSPGK

SEQ ID NO: 61 - protein, 217 aa, Artificial Sequence
  Description of Artificial Sequence: Synthetic polypeptide
APELLGGPSVFLFPPKPKDTLMISRTPEVTCVVVDVSHEDPEVYFDWYVDGVMVRREWHRPREEQYNSTYRVVSVLTVLHQDWLNGKEYKCKVSNKALPAPIEKTISKAKGQPREPQVYTLPPSRDELTKNQVSLTCLVKGFYPSDIAVEWESNGQPENNYKTTPPVLDSDGSFFLYSKLTVDKSRWQQGNVFSCSVMHEALHNHYTQKSLSLSPGK

SEQ ID NO: 62 - protein, 217 aa, Artificial Sequence
  Description of Artificial Sequence: Synthetic polypeptide
APELLGGPSVFLFPPKPKDTLMISRTPEVTCVVVDVSHEDPEVWFEWYVDGVFVGVAYDVPREEQYNSTYRVVSVLTVLHQDWLNGKEYKCKVSNKALPAPIEKTISKAKGQPREPQVYTLPPSRDELTKNQVSLTCLVKGFYPSDIAVEWESNGQPENNYKTTPPVLDSDGSFFLYSKLTVDKSRWQQGNVFSCSVMHEALHNHYTQKSLSLSPGK

SEQ ID NO: 63 - protein, 217 aa, Artificial Sequence
  Description of Artificial Sequence: Synthetic polypeptide
APELLGGPSVFLFPPKPKDTLMISRTPEVTCVVVDPQTPPWEVKFNWYVDGVEVHNAKTKPREEEYYTYYRVVSVLTVLHQDWLNGKEYKCKVSNKALPAPIEKTISKAKGQPREPQVYTLPPSRDELTKNQVSLTCLVKGFYPSDIAVEWESNGQPENNYKTTPPVLDSDGSFFLYSKLTVDKSRWQQGNVFSCSVMHEALHNHYTQKSLSLSPGK

SEQ ID NO: 64 - protein, 217 aa, Artificial Sequence
  Description of Artificial Sequence: Synthetic polypeptide
APELLGGPSVFLFPPKPKDTLMISRTPEVTCVVVDPPSPPWEVKFNWYVDGVEVHNAKTKPREEEYYSNYRVVSVLTVLHQDWLNGKEYKCKVSNKALPAPIEKTISKAKGQPREPQVYTLPPSRDELTKNQVSLTCLVKGFYPSDIAVEWESNGQPENNYKTTPPVLDSDGSFFLYSKLTVDKSRWQQGNVFSCSVMHEALHNHYTQKSLSLSPGK

SEQ ID NO: 65 - protein, 217 aa, Artificial Sequence
  Description of Artificial Sequence: Synthetic polypeptide
APELLGGPSVFLFPPKPKDTLMISRTPEVTCVVVDPQTPPWEVKFNWYVDGVEVHNAKTKPREEEYYSNYRVVSVLTVLHQDWLNGKEYKCKVSNKALPAPIEKTISKAKGQPREPQVYTLPPSRDELTKNQVSLTCLVKGFYPSDIAVEWESNGQPENNYKTTPPVLDSDGSFFLYSKLTVDKSRWQQGNVFSCSVMHEALHNHYTQKSLSLSPGK

SEQ ID NO: 66 - protein, 217 aa, Artificial Sequence
  Description of Artificial Sequence: Synthetic polypeptide
APELLGGPSVFLFPPKPKDTLMISRTPEVTCVVVDFRGPPWEVKFNWYVDGVEVHNAKTKPREEEYYHDYRVVSVLTVLHQDWLNGKEYKCKVSNKALPAPIEKTISKAKGQPREPQVYTLPPSRDELTKNQVSLTCLVKGFYPSDIAVEWESNGQPENNYKTTPPVLDSDGSFFLYSKLTVDKSRWQQGNVFSCSVMHEALHNHYTQKSLSLSPGK

SEQ ID NO: 67 - protein, 217 aa, Artificial Sequence
  Description of Artificial Sequence: Synthetic polypeptide
APELLGGPSVFLFPPKPKDTLMISRTPEVTCVVVDPQTVPWEVKFNWYVDGVEVHNAKTKPREEEYYSNYRVVSVLTVLHQDWLNGKEYKCKVSNKALPAPIEKTISKAKGQPREPQVYTLPPSRDELTKNQVSLTCLVKGFYPSDIAVEWESNGQPENNYKTTPPVLDSDGSFFLYSKLTVDKSRWQQGNVFSCSVMHEALHNHYTQKSLSLSPGK

SEQ ID NO: 68 - protein, 217 aa, Artificial Sequence
  Description of Artificial Sequence: Synthetic polypeptide
APELLGGPSVFLFPPKPKDTLMISRTPEVTCVVVDPKMPPWEVKFNWYVDGVEVHNAKTKPREEEYYTYYRVVSVLTVLHQDWLNGKEYKCKVSNKALPAPIEKTISKAKGQPREPQVYTLPPSRDELTKNQVSLTCLVKGFYPSDIAVEWESNGQPENNYKTTPPVLDSDGSFFLYSKLTVDKSRWQQGNVFSCSVMHEALHNHYTQKSLSLSPGK

SEQ ID NO: 69 - protein, 217 aa, Artificial Sequence
  Description of Artificial Sequence: Synthetic polypeptide
APELLGGPSVFLFPPKPKDTLMISRTPEVTCVVVDPPVPPWEVKFNWYVDGVEVHNAKTKPREEEYYSNYRVVSVLTVLHQDWLNGKEYKCKVSNKALPAPIEKTISKAKGQPREPQVYTLPPSRDELTKNQVSLTCLVKGFYPSDIAVEWESNGQPENNYKTTPPVLDSDGSFFLYSKLTVDKSRWQQGNVFSCSVMHEALHNHYTQKSLSLSPGK

SEQ ID NO: 70 - protein, 217 aa, Artificial Sequence
  Description of Artificial Sequence: Synthetic polypeptide
APELLGGPSVFLFPPKPKDTLMISRTPEVTCVVVDPAFPPWEVKFNWYVDGVEVHNAKTKPREEEYYQNYRVVSVLTVLHQDWLNGKEYKCKVSNKALPAPIEKTISKAKGQPREPQVYTLPPSRDELTKNQVSLTCLVKGFYPSDIAVEWESNGQPENNYKTTPPVLDSDGSFFLYSKLTVDKSRWQQGNVFSCSVMHEALHNHYTQKSLSLSPGK

SEQ ID NO: 71 - protein, 217 aa, Artificial Sequence
  Description of Artificial Sequence: Synthetic polypeptide
APELLGGPSVFLFPPKPKDTLMISRTPEVTCVVVDAIWPPWEVKFNWYVDGVEVHNAKTKPREEEYYSNYRVVSVLTVLHQDWLNGKEYKCKVSNKALPAPIEKTISKAKGQPREPQVYTLPPSRDELTKNQVSLTCLVKGFYPSDIAVEWESNGQPENNYKTTPPVLDSDGSFFLYSKLTVDKSRWQQGNVFSCSVMHEALHNHYTQKSLSLSPGK

SEQ ID NO: 72 - protein, 217 aa, Artificial Sequence
  Description of Artificial Sequence: Synthetic polypeptide
APELLGGPSVFLFPPKPKDTLMISRTPEVTCVVVDPPVAPWEVKFNWYVDGVEVHNAKTKPREEEYYSSYRVVSVLTVLHQDWLNGKEYKCKVSNKALPAPIEKTISKAKGQPREPQVYTLPPSRDELTKNQVSLTCLVKGFYPSDIAVEWESNGQPENNYKTTPPVLDSDGSFFLYSKLTVDKSRWQQGNVFSCSVMHEALHNHYTQKSLSLSPGK

SEQ ID NO: 73 - protein, 217 aa, Artificial Sequence
  Description of Artificial Sequence: Synthetic polypeptide
APELLGGPSVFLFPPKPKDTLMISRTPEVTCVVVDPQMPPQEVKFNWYVDGVEVHNAKTKPREEEYYSNYRVVSVLTVLHQDWLNGKEYKCKVSNKALPAPIEKTISKAKGQPREPQVYTLPPSRDELTKNQVSLTCLVKGFYPSDIAVEWESNGQPENNYKTTPPVLDSDGSFFLYSKLTVDKSRWQQGNVFSCSVMHEALHNHYTQKSLSLSPGK

SEQ ID NO: 74 - protein, 217 aa, Artificial Sequence
  Description of Artificial Sequence: Synthetic polypeptide
APELLGGPSVFLFPPKPKDTLMISRTPEVTCVVVDPQTAPWEVKFNWYVDGVEVHNAKTKPREEEYYTYYRVVSVLTVLHQDWLNGKEYKCKVSNKALPAPIEKTISKAKGQPREPQVYTLPPSRDELTKNQVSLTCLVKGFYPSDIAVEWESNGQPENNYKTTPPVLDSDGSFFLYSKLTVDKSRWQQGNVFSCSVMHEALHNHYTQKSLSLSPGK

SEQ ID NO: 75 - protein, 217 aa, Artificial Sequence
  Description of Artificial Sequence: Synthetic polypeptide
APELLGGPSVFLFPPKPKDTLMISRTPEVTCVVVDPQTPPQEVKFNWYVDGVEVHNAKTKPREEEYYSNYRVVSVLTVLHQDWLNGKEYKCKVSNKALPAPIEKTISKAKGQPREPQVYTLPPSRDELTKNQVSLTCLVKGFYPSDIAVEWESNGQPENNYKTTPPVLDSDGSFFLYSKLTVDKSRWQQGNVFSCSVMHEALHNHYTQKSLSLSPGK

SEQ ID NO: 76 - protein, 217 aa, Artificial Sequence; identical to SEQ ID NO: 63
  Description of Artificial Sequence: Synthetic polypeptide

SEQ ID NO: 77 - protein, 217 aa, Artificial Sequence
  Description of Artificial Sequence: Synthetic polypeptide
APELLGGPSVFLFPPKPKDTLMISRTPEVTCVVVDPRVPPWEVKFNWYVDGVEVHNAKTKPREEEYYQNYRVVSVLTVLHQDWLNGKEYKCKVSNKALPAPIEKTISKAKGQPREPQVYTLPPSRDELTKNQVSLTCLVKGFYPSDIAVEWESNGQPENNYKTTPPVLDSDGSFFLYSKLTVDKSRWQQGNVFSCSVMHEALHNHYTQKSLSLSPGK

SEQ ID NO: 78 - protein, 217 aa, Artificial Sequence
  Description of Artificial Sequence: Synthetic polypeptide
APELLGGPSVFLFPPKPKDTLMISRTPEVTCVVVDPSVPPWEVKFNWYVDGVEVHNAKTKPREEEYYSNYRVVSVLTVLHQDWLNGKEYKCKVSNKALPAPIEKTISKAKGQPREPQVYTLPPSRDELTKNQVSLTCLVKGFYPSDIAVEWESNGQPENNYKTTPPVLDSDGSFFLYSKLTVDKSRWQQGNVFSCSVMHEALHNHYTQKSLSLSPGK

SEQ ID NO: 79 - protein, 217 aa, Artificial Sequence
  Description of Artificial Sequence: Synthetic polypeptide
APELLGGPSVFLFPPKPKDTLMISRTPEVTCVVVDMLWPVPEVKFNWYVDGVEVHNAKTKPREEVYHRPYRVVSVLTVLHQDWLNGKEYKCKVSNKALPAPIEKTISKAKGQPREPQVYTLPPSRDELTKNQVSLTCLVKGFYPSDIAVEWESNGQPENNYKTTPPVLDSDGSFFLYSKLTVDKSRWQQGNVFSCSVMHEALHNHYTQKSLSLSPGK

SEQ ID NO: 80 - protein, 217 aa, Artificial Sequence
  Description of Artificial Sequence: Synthetic polypeptide
APELLGGPSVFLFPPKPKDTLMISRTPEVTCVVVDMLWPVPEVKFNWYVDGVEVHNAKTKPREETYHNPYRVVSVLTVLHQDWLNGKEYKCKVSNKALPAPIEKTISKAKGQPREPQVYTLPPSRDELTKNQVSLTCLVKGFYPSDIAVEWESNGQPENNYKTTPPVLDSDGSFFLYSKLTVDKSRWQQGNVFSCSVMHEALHNHYTQKSLSLSPGK

SEQ ID NO: 81 - protein, 217 aa, Artificial Sequence
  Description of Artificial Sequence: Synthetic polypeptide
APELLGGPSVFLFPPKPKDTLMISRTPEVTCVVVDMEWPVTEVKFNWYVDGVEVHNAKTKPREETYHNPYRVVSVLTVLHQDWLNGKEYKCKVSNKALPAPIEKTISKAKGQPREPQVYTLPPSRDELTKNQVSLTCLVKGFYPSDIAVEWESNGQPENNYKTTPPVLDSDGSFFLYSKLTVDKSRWQQGNVFSCSVMHEALHNHYTQKSLSLSPGK

SEQ ID NO: 82 - protein, 217 aa, Artificial Sequence
  Description of Artificial Sequence: Synthetic polypeptide
APELLGGPSVFLFPPKPKDTLMISRTPEVTCVVVDMLWPVPEVKFNWYVDGVEVHNAKTKPREETYHHPYRVVSVLTVLHQDWLNGKEYKCKVSNKALPAPIEKTISKAKGQPREPQVYTLPPSRDELTKNQVSLTCLVKGFYPSDIAVEWESNGQPENNYKTTPPVLDSDGSFFLYSKLTVDKSRWQQGNVFSCSVMHEALHNHYTQKSLSLSPGK

SEQ ID NO: 83 - protein, 217 aa, Artificial Sequence
  Description of Artificial Sequence: Synthetic polypeptide
APELLGGPSVFLFPPKPKDTLMISRTPEVTCVVVDDDLTFQEVKFNWYVDGVEVHNAKTKPREEVYVTPYRVVSVLTVLHQDWLNGKEYKCKVSNKALPAPIEKTISKAKGQPREPQVYTLPPSRDELTKNQVSLTCLVKGFYPSDIAVEWESNGQPENNYKTTPPVLDSDGSFFLYSKLTVDKSRWQQGNVFSCSVMHEALHNHYTQKSLSLSPGK

SEQ ID NO: 84 - protein, 217 aa, Artificial Sequence
  Description of Artificial Sequence: Synthetic polypeptide
APELLGGPSVFLFPPKPKDTLMISRTPEVTCVVVDDDLTFQEVKFNWYVDGVEVHNAKTKPREELYVTPYRVVSVLTVLHQDWLNGKEYKCKVSNKALPAPIEKTISKAKGQPREPQVYTLPPSRDELTKNQVSLTCLVKGFYPSDIAVEWESNGQPENNYKTTPPVLDSDGSFFLYSKLTVDKSRWQQGNVFSCSVMHEALHNHYTQKSLSLSPGK

SEQ ID NO: 85 - protein, 217 aa, Artificial Sequence
  Description of Artificial Sequence: Synthetic polypeptide
APELLGGPSVFLFPPKPKDTLMISRTPEVTCVVVDAYGDPEEVKFNWYVDGVEVHNAKTKPREEWYDVPYRVVSVLTVLHQDWLNGKEYKCKVSNKALPAPIEKTISKAKGQPREPQVYTLPPSRDELTKNQVSLTCLVKGFYPSDIAVEWESNGQPENNYKTTPPVLDSDGSFFLYSKLTVDKSRWQQGNVFSCSVMHEALHNHYTQKSLSLSPGK

SEQ ID NO: 86 - protein, 217 aa, Artificial Sequence
  Description of Artificial Sequence: Synthetic polypeptide
APELLGGPSVFLFPPKPKDTLMISRTPEVTCVVVDVSVPPRMVKFNWYVDGVEVHNAKTKSLTSQHNSTVRVVSVLTVLHQDWLNGKEYKCKVSNKALPAPIEKTISKAKGQPREPQVYTLPPSRDELTKNQVSLTCLVKGFYPSDIAVEWESNGQPENNYKTTPPVLDSDGSFFLYSKLTVDKSRWQQGNVFSCSVMHEALHNHYTQKSLSLSPGK

SEQ ID NO: 87 - protein, 217 aa, Artificial Sequence
  Description of Artificial Sequence: Synthetic polypeptide
APELLGGPSVFLFPPKPKDTLMISRTPEVTCVVVDVSVPPWMVKFNWYVDGVEVHNAKTKSLTSQHNSTVRVVSVLTVLHQDWLNGKEYKCKVSNKALPAPIEKTISKAKGQPREPQVYTLPPSRDELTKNQVSLTCLVKGFYPSDIAVEWESNGQPENNYKTTPPVLDSDGSFFLYSKLTVDKSRWQQGNVFSCSVMHEALHNHYTQKSLSLSPGK

SEQ ID NO: 88 - protein, 217 aa, Artificial Sequence
  Description of Artificial Sequence: Synthetic polypeptide
APELLGGPSVFLFPPKPKDTLMISRTPEVTCVVVDVSDMWEYVKFNWYVDGVEVHNAKTKPWVKQLNSTWRVVSVLTVLHQDWLNGKEYKCKVSNKALPAPIEKTISKAKGQPREPQVYTLPPSRDELTKNQVSLTCLVKGFYPSDIAVEWESNGQPENNYKTTPPVLDSDGSFFLYSKLTVDKSRWQQGNVFSCSVMHEALHNHYTQKSLSLSPGK

SEQ ID NO: 89 - protein, 217 aa, Artificial Sequence
  Description of Artificial Sequence: Synthetic polypeptide
APELLGGPSVFLFPPKPKDTLMISRTPEVTCVVVDVSDDWTWVKFNWYVDGVEVHNAKTKPWIAQPNSTWRVVSVLTVLHQDWLNGKEYKCKVSNKALPAPIEKTISKAKGQPREPQVYTLPPSRDELTKNQVSLTCLVKGFYPSDIAVEWESNGQPENNYKTTPPVLDSDGSFFLYSKLTVDKSRWQQGNVFSCSVMHEALHNHYTQKSLSLSPGK

SEQ ID NO: 90 - protein, 217 aa, Artificial Sequence
  Description of Artificial Sequence: Synthetic polypeptide
APELLGGPSVFLFPPKPKDTLMISRTPEVTCVVVDVSDDWEWVKFNWYVDGVEVHNAKTKPWKLQLNSTWRVVSVLTVLHQDWLNGKEYKCKVSNKALPAPIEKTISKAKGQPREPQVYTLPPSRDELTKNQVSLTCLVKGFYPSDIAVEWESNGQPENNYKTTPPVLDSDGSFFLYSKLTVDKSRWQQGNVFSCSVMHEALHNHYTQKSLSLSPGK

SEQ ID NO: 91 - protein, 217 aa, Artificial Sequence
  Description of Artificial Sequence: Synthetic polypeptide
APELLGGPSVFLFPPKPKDTLMISRTPEVTCVVVDVSHEDPWVWFYWYVDGVEVHNAKTKPREEQYNSTYRVVSVLTVLHQDWLNGKEYKCSVVNIALWWSIEKTISKAKGQPREPQVYTLPPSRDELTKNQVSLTCLVKGFYPSDIAVEWESNGQPENNYKTTPPVLDSDGSFFLYSKLTVDKSRWQQGNVFSCSVMHEALHNHYTQKSLSLSPGK

SEQ ID NO: 92 - protein, 217 aa, Artificial Sequence
  Description of Artificial Sequence: Synthetic polypeptide
APELLGGPSVFLFPPKPKDTLMISRTPEVTCVVVDVSHEDPVVGFRWYVDGVEVHNAKTKPREEQYNSTYRVVSVLTVLHQDWLNGKEYKCRVSNSALTWKIEKTISKAKGQPREPQVYTLPPSRDELTKNQVSLTCLVKGFYPSDIAVEWESNGQPENNYKTTPPVLDSDGSFFLYSKLTVDKSRWQQGNVFSCSVMHEALHNHYTQKSLSLSPGK

SEQ ID NO: 93 - protein, 217 aa, Artificial Sequence
  Description of Artificial Sequence: Synthetic polypeptide
APELLGGPSVFLFPPKPKDTLMISRTPEVTCVVVDVSHEDPVVGFRWYVDGVEVHNAKTKPREEQYNSTYRVVSVLTVLHQDWLNGKEYKCRVSNSALSWRIEKTISKAKGQPREPQVYTLPPSRDELTKNQVSLTCLVKGFYPSDIAVEWESNGQPENNYKTTPPVLDSDGSFFLYSKLTVDKSRWQQGNVFSCSVMHEALHNHYTQKSLSLSPGK

SEQ ID NO: 94 - protein, 217 aa, Artificial Sequence
  Description of Artificial Sequence: Synthetic polypeptide
APELLGGPSVFLFPPKPKDTLMISRTPEVTCVVVDVSHEDPIVGFRWYVDGVEVHNAKTKPREEQYNSTYRVVSVLTVLHQDWLNGKEYKCRVSNSALRWRIEKTISKAKGQPREPQVYTLPPSRDELTKNQVSLTCLVKGFYPSDIAVEWESNGQPENNYKTTPPVLDSDGSFFLYSKLTVDKSRWQQGNVFSCSVMHEALHNHYTQKSLSLSPGK

SEQ ID NO: 95 - protein, 217 aa, Artificial Sequence
  Description of Artificial Sequence: Synthetic polypeptide
APELLGGPSVFLFPPKPKDTLMISRTPEVTCVVVDVSHEDPAVGFEWYVDGVEVHNAKTKPREEQYNSTYRVVSVLTVLHQDWLNGKEYKCQVFNWALDWVIEKTISKAKGQPREPQVYTLPPSRDELTKNQVSLTCLVKGFYPSDIAVEWESNGQPENNYKTTPPVLDSDGSFFLYSKLTVDKSRWQQGNVFSCSVMHEALHNHYTQKSLSLSPGK

SEQ ID NO: 96 - protein, 181 aa, Homo sapiens
NSVIIVDKNGRLVYLVENPGGYVAYSKAATVTGKLVHANFGTKKDFEDLYTPVNGSIVIVRAGKITFAEKVANAESLNAIGVLIYMDQTKFPIVNAELSFFGHAHLGTGDPYTPGFPSFNHTQFPPSRSSGLPNIPVQTISRAAAEKLFGNMEGDCPSDWKTDSTCRMVTSESKNVKLTVS

SEQ ID NO: 97 - protein, 181 aa, Macaca fascicularis
NSVIIVDKNGGLVYLVENPGGYVAYSKAATVTGKLVHANFGTKKDFEDLDSPVNGSIVIVRAGKITFAEKVANAESLNAIGVLIYMDQTKFPIVKADLSFFGHAHLGTGDPYTPGFPSFNHTQFPPSQSSGLPNIPVQTISRAAAEKLFGNMEGDCPSDWKTDSTCKMVTSENKSVKLTVS

SEQ ID NO: 98 - protein, 159 aa, Artificial Sequence
  Description of Artificial Sequence: Synthetic polypeptide
SSGLPNIPVQTISRAAAEKLFGNMEGDCPSDWKTDSTCRMVTSESKNVKLTVSNDSAQNSVIIVDKNGRLVYLVENPGGYVAYSKAATVTGKLVHANFGTKKDFEDLYTPVNGSIVIVRAGKITFAEKVANAESLNAIGVLIYMDQTKFPIVNAELSGP

SEQ ID NO: 99 - protein, 159 aa, Artificial Sequence
  Description of Artificial Sequence: Synthetic polypeptide
SSGLPNIPVQTISRAAAEKLFGNMEGDCPSDWKTDSTCKMVTSENKSVKLTVSNDSAQNSVIIVDKNGGLVYLVENPGGYVAYSKAATVTGKLVHANFGTKKDFEDLDSPVNGSIVIVRAGKITFAEKVANAESLNAIGVLIYMDQTKFPIVKADLSGP

SEQ ID NO: 100 - protein, 760 aa, Homo sapiens
MMDQARSAFSNLFGGEPLSYTRFSLARQVDGDNSHVEMKLAVDEEENADNNTKANVTKPKRCSGSICYGTIAVIVFFLIGFMIGYLGYCKGVEPKTECERLAGTESPVREEPGEDFPAARRLYWDDLKRKLSEKLDSTDFTGTIKLLNENSYVPREAGSQKDENLALYVENQFREFKLSKVWRDQHFVKIQVKDSAQNSVIIVDKNGRLVYLVENPGGYVAYSKAATVTGKLVHANFGTKKDFEDLYTPVNGSIVIVRAGKITFAEKVANAESLNAIGVLIYMDQTKFPIVNAELSFFGHAHLGTGDPYTPGFPSFNHTQFPPSRSSGLPNIPVQTISRAAAEKLFGNMEGDCPSDWKTDSTCRMVTSESKNVKLTVSNVLKEIKILNIFGVIKGFVEPDHYVVVGAQRDAWGPGAAKSGVGTALLLKLAQMFSDMVLKDGFQPSRSIIFASWSAGDFGSVGATEWLEGYLSSLHLKAFTYINLDKAVLGTSNFKVSASPLLYTLIEKTMQNVKHPVTGQFLYQDSNWASKVEKLTLDNAAFPFLAYSGIPAVSFCFCEDTDYPYLGTTMDTYKELIERIPELNKVARAAAEVAGQFVIKLTHDVELNLDYERYNSQLLSFVRDLNQYRADIKEMGLSLQWLYSARGDFFRATSRLTTDFGNAEKTDRFVMKKLNDRVMRVEYHFLSPYVSPKESPFRHVFWGSGSHTLPALLENLKLRKQNNGAFNETLFRNQLALATWTIQGAANALSGDVWDIDNEF

SEQ ID NO: 101 - protein, 217 aa, Artificial Sequence; identical to SEQ ID NO: 24
  Description of Artificial Sequence: Synthetic polypeptide

SEQ ID NO: 102 - protein, 217 aa, Artificial Sequence; identical to SEQ ID NO: 25
  Description of Artificial Sequence: Synthetic polypeptide

SEQ ID NO: 103 - protein, 217 aa, Artificial Sequence; identical to SEQ ID NO: 26
  Description of Artificial Sequence: Synthetic polypeptide

SEQ ID NO: 104 - protein, 217 aa, Artificial Sequence
  Description of Artificial Sequence: Synthetic polypeptide
APELLGGPSVFLFPPKPKDTLMISRTPEVTCVVVDVSHEDPEVKFNWYVDGVEVHNAKTKPREEQYNSTYRVVSVLTVLHQDWLNGKEYKCKVSNKALPAPIEKTISKAKGQPREPQVYTLPPSRDELTKNQVSLTCLVKGFYPSDIAVWWESYGTEWSNYKTTPPVLDSDGSFFLYSKLTVTKSEWQQGFVFSCSVMHEALHNHYTQKSLSLSPGK

SEQ ID NO: 105 - protein, 217 aa, Artificial Sequence
  Description of Artificial Sequence: Synthetic polypeptide
APELLGGPSVFLFPPKPKDTLMISRTPEVTCVVVDVSHEDPEVKFNWYVDGVEVHNAKTKPREEQYNSTYRVVSVLTVLHQDWLNGKEYKCKVSNKALPAPIEKTISKAKGQPREPQVYTLPPSRDELTKNQVSLTCLVKGFYPSDIAVEWESYGTEWSNYKTTPPVLDSDGSFFLYSKLTVTKEEWQQGFVFSCSVMHEALHNHYTQKSLSLSPGK

SEQ ID NO: 106 - protein, 217 aa, Artificial Sequence
  Description of Artificial Sequence: Synthetic polypeptide
APELLGGPSVFLFPPKPKDTLMISRTPEVTCVVVDVSHEDPEVKFNWYVDGVEVHNAKTKPREEQYNSTYRVVSVLTVLHQDWLNGKEYKCKVSNKALPAPIEKTISKAKGQPREPQVYTLPPSRDELTKNQVSLTCLVKGFYPSDIAVWWESYGTEWSNYKTTPPVLDSDGSFFLYSKLTVTKEEWQQGFVFSCSVMHEALHNHYTQKSLSLSPGK

SEQ ID NO: 107 - protein, 217 aa, Artificial Sequence; identical to SEQ ID NO: 21
  Description of Artificial Sequence: Synthetic polypeptide

SEQ ID NO: 108 - protein, 217 aa, Artificial Sequence
  Description of Artificial Sequence: Synthetic polypeptide
APELLGGPSVFLFPPKPKDTLMISRTPEVTCVVVDVSHEDPEVKFNWYVDGVEVHNAKTKPREEQYNSTYRVVSVLTVLHQDWLNGKEYKCKVSNKALPAPIEKTISKAKGQPREPQVYTLPPSRDELTKNQVSLTCLVKGFYPSDIAVLWESLGHVWAVYKTTPPVLDSDGSFFLYSKLTVPKSTWQQGWVFSCSVMHEALHNHYTQKSLSLSPGK

SEQ ID NO: 109 - protein, 217 aa, Artificial Sequence
  Description of Artificial Sequence: Synthetic polypeptide
APELLGGPSVFLFPPKPKDTLMISRTPEVTCVVVDVSHEDPEVKFNWYVDGVEVHNAKTKPREEQYNSTYRVVSVLTVLHQDWLNGKEYKCKVSNKALPAPIEKTISKAKGQPREPQVYTLPPSRDELTKNQVSLTCLVKGFYPSDIAVYWESLGHVWAVYKTTPPVLDSDGSFFLYSKLTVPKSTWQQGWVFSCSVMHEALHNHYTQKSLSLSPGK

SEQ ID NO: 110 - protein, 217 aa, Artificial Sequence; identical to SEQ ID NO: 22
  Description of Artificial Sequence: Synthetic polypeptide

SEQ ID NO: 111 - protein, 217 aa, Artificial Sequence
  Description of Artificial Sequence: Synthetic polypeptide
APELLGGPSVFLFPPKPKDTLMISRTPEVTCVVVDVSHEDPEVKFNWYVDGVEVHNAKTKPREEQYNSTYRVVSVLTVLHQDWLNGKEYKCKVSNKALPAPIEKTISKAKGQPREPQVYTLPPSRDELTKNQVSLTCLVKGFYPSDIAVEWESLGHVWAVYFTTPPVLDSDGSFFLYSKLTVPKSTWQQGWVFSCSVMHEALHNHYTQKSLSLSPGK

SEQ ID NO: 112 - protein, 217 aa, Artificial Sequence
  Description of Artificial Sequence: Synthetic polypeptide
APELLGGPSVFLFPPKPKDTLMISRTPEVTCVVVDVSHEDPEVKFNWYVDGVEVHNAKTKPREEQYNSTYRVVSVLTVLHQDWLNGKEYKCKVSNKALPAPIEKTISKAKGQPREPQVYTLPPSRDELTKNQVSLTCLVKGFYPSDIAVEWESLGHVWAVYHTTPPVLDSDGSFFLYSKLTVPKSTWQQGWVFSCSVMHEALHNHYTQKSLSLSPGK

SEQ ID NO: 113 - protein, 217 aa, Artificial Sequence
  Description of Artificial Sequence: Synthetic polypeptide
APELLGGPSVFLFPPKPKDTLMISRTPEVTCVVVDVSHEDPEVKFNWYVDGVEVHNAKTKPREEQYNSTYRVVSVLTVLHQDWLNGKEYKCKVSNKALPAPIEKTISKAKGQPREPQVYTLPPSRDELTKNQVSLTCLVKGFYPSDIAVLWESYGTEWSSYKTTPPVLDSDGSFFLYSKLTVTKSEWQQGFVFSCSVMHEALHNHYTQKSLSLSPGK

SEQ ID NO: 114 - protein, 217 aa, Artificial Sequence
  Description of Artificial Sequence: Synthetic polypeptide
APELLGGPSVFLFPPKPKDTLMISRTPEVTCVVVDVSHEDPEVKFNWYVDGVEVHNAKTKPREEQYNSTYRVVSVLTVLHQDWLNGKEYKCKVSNKALPAPIEKTISKAKGQPREPQVYTLPPSRDELTKNQVSLTCLVKGFYPSDIAVLWESYGTEWSSYRTTPPVLDSDGSFFLYSKLTVTKSEWQQGFVFSCSVMHEALHNHYTQKSLSLSPGK

SEQ ID NO: 115 - protein, 217 aa, Artificial Sequence
  Description of Artificial Sequence: Synthetic polypeptide
APELLGGPSVFLFPPKPKDTLMISRTPEVTCVVVDVSHEDPEVKFNWYVDGVEVHNAKTKPREEQYNSTYRVVSVLTVLHQDWLNGKEYKCKVSNKALPAPIEKTISKAKGQPREPQVYTLPPSRDELTKNQVSLTCLVKGFYPSDIAVLWESYGTEWSSYRTTPPVLDSDGSFFLYSKLTVTREEWQQGFVFSCSVMHEALHNHYTQKSLSLSPGK

SEQ ID NO: 116 - protein, 217 aa, Artificial Sequence
  Description of Artificial Sequence: Synthetic polypeptide
APELLGGPSVFLFPPKPKDTLMISRTPEVTCVVVDVSHEDPEVKFNWYVDGVEVHNAKTKPREEQYNSTYRVVSVLTVLHQDWLNGKEYKCKVSNKALPAPIEKTISKAKGQPREPQVYTLPPSRDELTKNQVSLTCLVKGFYPSDIAVLWESYGTEWSSYRTTPPVLDSDGSFFLYSKLTVTGEEWQQGFVFSCSVMHEALHNHYTQKSLSLSPGK

SEQ ID NO: 117 - protein, 217 aa, Artificial Sequence
  Description of Artificial Sequence: Synthetic polypeptide
APELLGGPSVFLFPPKPKDTLMISRTPEVTCVVVDVSHEDPEVKFNWYVDGVEVHNAKTKPREEQYNSTYRVVSVLTVLHQDWLNGKEYKCKVSNKALPAPIEKTISKAKGQPREPQVYTLPPSRDELTKNQVSLTCLVKGFYPSDIAVLWESYGTEWSSYRTTPPVLDSDGSFFLYSKLTVTREEWQQGFVFSCWVMHEALHNHYTQKSLSLSPGK

SEQ ID NO: 118 - protein, 217 aa, Artificial Sequence
  Description of Artificial Sequence: Synthetic polypeptide
APELLGGPSVFLFPPKPKDTLMISRTPEVTCVVVDVSHEDPEVKFNWYVDGVEVHNAKTKPREEQYNSTYRVVSVLTVLHQDWLNGKEYKCKVSNKALPAPIEKTISKAKGQPREPQVYTLPPSRDELTKNQVSLTCLVKGFYPSDIAVLWESYGTEWSSYRTTPPVLDSDGSFFLYSKLTVTKEEWQQGFVFSCWVMHEALHNHYTQKSLSLSPGK

SEQ ID NO: 119 - protein, 217 aa, Artificial Sequence
  Description of Artificial Sequence: Synthetic polypeptide
APELLGGPSVFLFPPKPKDTLMISRTPEVTCVVVDVSHEDPEVKFNWYVDGVEVHNAKTKPREEQYNSTYRVVSVLTVLHQDWLNGKEYKCKVSNKALPAPIEKTISKAKGQPREPQVYTLPPSRDELTKNQVSLTCLVKGFYPSDIAVLWESYGTEWSSYRTTPPVLDSDGSFFLYSKLTVTREEWQQGFVFTCWVMHEALHNHYTQKSLSLSPGK

SEQ ID NO: 120 - protein, 217 aa, Artificial Sequence
  Description of Artificial Sequence: Synthetic polypeptide
APELLGGPSVFLFPPKPKDTLMISRTPEVTCVVVDVSHEDPEVKFNWYVDGVEVHNAKTKPREEQYNSTYRVVSVLTVLHQDWLNGKEYKCKVSNKALPAPIEKTISKAKGQPREPQVYTLPPSRDELTKNQVSLTCLVKGFYPSDIAVLWESYGTEWSSYRTTPPVLDSDGSFFLYSKLTVTREEWQQGFVFTCGVMHEALHNHYTQKSLSLSPGK

SEQ ID NO: 121 - protein, 217 aa, Artificial Sequence
  Description of Artificial Sequence: Synthetic polypeptide
APELLGGPSVFLFPPKPKDTLMISRTPEVTCVVVDVSHEDPEVKFNWYVDGVEVHNAKTKPREEQYNSTYRVVSVLTVLHQDWLNGKEYKCKVSNKALPAPIEKTISKAKGQPREPQVYTLPPSRDELTKNQVSLTCLVKGFYPSDIAVLWESYGTEWSSYRTTPPVLDSDGSFFLYSKLTVTREEWQQGFVFECWVMHEALHNHYTQKSLSLSPGK

SEQ ID NO: 122 - protein, 217 aa, Artificial Sequence
  Description of Artificial Sequence: Synthetic polypeptide
APELLGGPSVFLFPPKPKDTLMISRTPEVTCVVVDVSHEDPEVKFNWYVDGVEVHNAKTKPREEQYNSTYRVVSVLTVLHQDWLNGKEYKCKVSNKALPAPIEKTISKAKGQPREPQVYTLPPSRDELTKNQVSLTCLVKGFYPSDIAVLWESYGTEWSSYRTTPPVLDSDGSFFLYSKLTVTREEWQQGFVFKCWVMHEALHNHYTQKSLSLSPGK

SEQ ID NO: 123 - protein, 217 aa, Artificial Sequence
  Description of Artificial Sequence: Synthetic polypeptide
APELLGGPSVFLFPPKPKDTLMISRTPEVTCVVVDVSHEDPEVKFNWYVDGVEVHNAKTKPREEQYNSTYRVVSVLTVLHQDWLNGKEYKCKVSNKALPAPIEKTISKAKGQPREPQVYTLPPSRDELTKNQVSLTCLVKGFYPSDIAVLWESYGTEWSSYRTTPPVLDSDGSFFLYSKLTVTPEEWQQGFVFKCWVMHEALHNHYTQKSLSLSPGK

SEQ ID NO: 124 - protein, 217 aa, Artificial Sequence
  Description of Artificial Sequence: Synthetic polypeptide
APELLGGPSVFLFPPKPKDTLMISRTPEVTCVVVDVSHEDPEVKFNWYVDGVEVHNAKTKPREEQYNSTYRVVSVLTVLHQDWLNGKEYKCKVSNKALPAPIEKTISKAKGQPREPQVYTLPPSRDELTKNQVSLTCLVKGFYPSDIAVWWESYGTEWSSYRTTPPVLDSDGSFFLYSKLTVTREEWQQGFVFSCSVMHEALHNHYTQKSLSLSPGK

SEQ ID NO: 125 - protein, 217 aa, Artificial Sequence
  Description of Artificial Sequence: Synthetic polypeptide
APELLGGPSVFLFPPKPKDTLMISRTPEVTCVVVDVSHEDPEVKFNWYVDGVEVHNAKTKPREEQYNSTYRVVSVLTVLHQDWLNGKEYKCKVSNKALPAPIEKTISKAKGQPREPQVYTLPPSRDELTKNQVSLTCLVKGFYPSDIAVWWESYGTEWSSYRTTPPVLDSDGSFFLYSKLTVTGEEWQQGFVFSCSVMHEALHNHYTQKSLSLSPGK

SEQ ID NO: 126 - protein, 217 aa, Artificial Sequence
  Description of Artificial Sequence: Synthetic polypeptide
APELLGGPSVFLFPPKPKDTLMISRTPEVTCVVVDVSHEDPEVKFNWYVDGVEVHNAKTKPREEQYNSTYRVVSVLTVLHQDWLNGKEYKCKVSNKALPAPIEKTISKAKGQPREPQVYTLPPSRDELTKNQVSLTCLVKGFYPSDIAVWWESYGTEWSSYRTTPPVLDSDGSFFLYSKLTVTREEWQQGFVFTCWVMHEALHNHYTQKSLSLSPGK

SEQ ID NO: 127 - protein, 217 aa, Artificial Sequence
  Description of Artificial Sequence: Synthetic polypeptide
APELLGGPSVFLFPPKPKDTLMISRTPEVTCVVVDVSHEDPEVKFNWYVDGVEVHNAKTKPREEQYNSTYRVVSVLTVLHQDWLNGKEYKCKVSNKALPAPIEKTISKAKGQPREPQVYTLPPSRDELTKNQVSLTCLVKGFYPSDIAVWWESYGTEWSSYRTTPPVLDSDGSFFLYSKLTVTGEEWQQGFVFTCWVMHEALHNHYTQKSLSLSPGK

SEQ ID NO: 128 - protein, 217 aa, Artificial Sequence
  Description of Artificial Sequence: Synthetic polypeptide
APELLGGPSVFLFPPKPKDTLMISRTPEVTCVVVDVSHEDPEVKFNWYVDGVEVHNAKTKPREEQYNSTYRVVSVLTVLHQDWLNGKEYKCKVSNKALPAPIEKTISKAKGQPREPQVYTLPPSRDELTKNQVSLTCLVKGFYPSDIAVWWESYGTEWSSYRTTPPVLDSDGSFFLYSKLTVTREEWQQGFVFTCGVMHEALHNHYTQKSLSLSPGK

SEQ ID NO: 129 - protein, 217 aa, Artificial Sequence
  Description of Artificial Sequence: Synthetic polypeptide
APELLGGPSVFLFPPKPKDTLMISRTPEVTCVVVDVSHEDPEVKFNWYVDGVEVHNAKTKPREEQYNSTYRVVSVLTVLHQDWLNGKEYKCKVSNKALPAPIEKTISKAKGQPREPQVYTLPPSRDELTKNQVSLTCLVKGFYPSDIAVLWESYGTEWSSYKTTPPVLDSDGSFFLYSKLTVTKEEWQQGFVFSCSVMHEALHNHYTQKSLSLSPGK

SEQ ID NO: 130 - protein, 217 aa, Artificial Sequence
  Description of Artificial Sequence: Synthetic polypeptide
APELLGGPSVFLFPPKPKDTLMISRTPEVTCVVVDVSHEDPEVKFNWYVDGVEVHNAKTKPREEQYNSTYRVVSVLTVLHQDWLNGKEYKCKVSNKALPAPIEKTISKAKGQPREPQVYTLPPSRDELTKNQVSLTCLVKGFYPSDIAVLWESYGTEWSSYRTTPPVLDSDGSFFLYSKLTVTKEEWQQGFVFSCSVMHEALHNHYTQKSLSLSPGK

SEQ ID NO: 131 - protein, 217 aa, Artificial Sequence
  Description of Artificial Sequence: Synthetic polypeptide
APELLGGPSVFLFPPKPKDTLMISRTPEVTCVVVDVSHEDPEVKFNWYVDGVEVHNAKTKPREEQYNSTYRVVSVLTVLHQDWLNGKEYKCKVSNKALPAPIEKTISKAKGQPREPQVYTLPPSRDELTKNQVSLTCLVKGFYPSDIAVEWESFGTEWSSYKTTPPVLDSDGSFFLYSKLTVTKEEWQQGFVFSCSVMHEALHNHYTQKSLSLSPGK

SEQ ID NO: 132 - protein, 217 aa, Artificial Sequence
  Description of Artificial Sequence: Synthetic polypeptide
APELLGGPSVFLFPPKPKDTLMISRTPEVTCVVVDVSHEDPEVKFNWYVDGVEVHNAKTKPREEQYNSTYRVVSVLTVLHQDWLNGKEYKCKVSNKALPAPIEKTISKAKGQPREPQVYTLPPSRDELTKNQVSLTCLVKGFYPSDIAVEWESYGTEWASYKTTPPVLDSDGSFFLYSKLTVTKEEWQQGFVFSCSVMHEALHNHYTQKSLSLSPGK

SEQ ID NO: 133 - protein, 217 aa, Artificial Sequence
  Description of Artificial Sequence: Synthetic polypeptide
APELLGGPSVFLFPPKPKDTLMISRTPEVTCVVVDVSHEDPEVKFNWYVDGVEVHNAKTKPREEQYNSTYRVVSVLTVLHQDWLNGKEYKCKVSNKALPAPIEKTISKAKGQPREPQVYTLPPSRDELTKNQVSLTCLVKGFYPSDIAVEWESYGTEWVSYKTTPPVLDSDGSFFLYSKLTVTKEEWQQGFVFSCSVMHEALHNHYTQKSLSLSPGK

SEQ ID NO: 134 - protein, 217 aa, Artificial Sequence
  Description of Artificial Sequence: Synthetic polypeptide
APELLGGPSVFLFPPKPKDTLMISRTPEVTCVVVDVSHEDPEVKFNWYVDGVEVHNAKTKPREEQYNSTYRVVSVLTVLHQDWLNGKEYKCKVSNKALPAPIEKTISKAKGQPREPQVYTLPPSRDELTKNQVSLTCLVKGFYPSDIAVEWESYGTEWSSYKTTPPVLDSDGSFFLYSKLTVSKEEWQQGFVFSCSVMHEALHNHYTQKSLSLSPGK

SEQ ID NO: 135 - protein, 217 aa, Artificial Sequence
  Description of Artificial Sequence: Synthetic polypeptide
APELLGGPSVFLFPPKPKDTLMISRTPEVTCVVVDVSHEDPEVKFNWYVDGVEVHNAKTKPREEQYNSTYRVVSVLTVLHQDWLNGKEYKCKVSNKALPAPIEKTISKAKGQPREPQVYTLPPSRDELTKNQVSLTCLVKGFYPSDIAVEWESFGTEWASYKTTPPVLDSDGSFFLYSKLTVTKEEWQQGFVFSCSVMHEALHNHYTQKSLSLSPGK

SEQ ID NO: 136 - protein, 217 aa, Artificial Sequence
  Description of Artificial Sequence: Synthetic polypeptide
APELLGGPSVFLFPPKPKDTLMISRTPEVTCVVVDVSHEDPEVKFNWYVDGVEVHNAKTKPREEQYNSTYRVVSVLTVLHQDWLNGKEYKCKVSNKALPAPIEKTISKAKGQPREPQVYTLPPSRDELTKNQVSLTCLVKGFYPSDIAVEWESFGTEWVSYKTTPPVLDSDGSFFLYSKLTVTKEEWQQGFVFSCSVMHEALHNHYTQKSLSLSPGK

SEQ ID NO: 137 - protein, 217 aa, Artificial Sequence
  Description of Artificial Sequence: Synthetic polypeptide
APELLGGPSVFLFPPKPKDTLMISRTPEVTCVVVDVSHEDPEVKFNWYVDGVEVHNAKTKPREEQYNSTYRVVSVLTVLHQDWLNGKEYKCKVSNKALPAPIEKTISKAKGQPREPQVYTLPPSRDELTKNQVSLTCLVKGFYPSDIAVWWESFGTEWSSYKTTPPVLDSDGSFFLYSKLTVTKEEWQQGFVFSCSVMHEALHNHYTQKSLSLSPGK

SEQ ID NO: 138 - protein, 217 aa, Artificial Sequence
  Description of Artificial Sequence: Synthetic polypeptide
APELLGGPSVFLFPPKPKDTLMISRTPEVTCVVVDVSHEDPEVKFNWYVDGVEVHNAKTKPREEQYNSTYRVVSVLTVLHQDWLNGKEYKCKVSNKALPAPIEKTISKAKGQPREPQVYTLPPSRDELTKNQVSLTCLVKGFYPSDIAVWWESYGTEWASYKTTPPVLDSDGSFFLYSKLTVTKEEWQQGFVFSCSVMHEALHNHYTQKSLSLSPGK

SEQ ID NO: 139 - protein, 217 aa, Artificial Sequence
  Description of Artificial Sequence: Synthetic polypeptide
APELLGGPSVFLFPPKPKDTLMISRTPEVTCVVVDVSHEDPEVKFNWYVDGVEVHNAKTKPREEQYNSTYRVVSVLTVLHQDWLNGKEYKCKVSNKALPAPIEKTISKAKGQPREPQVYTLPPSRDELTKNQVSLTCLVKGFYPSDIAVWWESYGTEWVSYKTTPPVLDSDGSFFLYSKLTVTKEEWQQGFVFSCSVMHEALHNHYTQKSLSLSPGK

SEQ ID NO: 140 - protein, 217 aa, Artificial Sequence
  Description of Artificial Sequence: Synthetic polypeptide
APELLGGPSVFLFPPKPKDTLMISRTPEVTCVVVDVSHEDPEVKFNWYVDGVEVHNAKTKPREEQYNSTYRVVSVLTVLHQDWLNGKEYKCKVSNKALPAPIEKTISKAKGQPREPQVYTLPPSRDELTKNQVSLTCLVKGFYPSDIAVWWESYGTEWSSYKTTPPVLDSDGSFFLYSKLTVSKEEWQQGFVFSCSVMHEALHNHYTQKSLSLSPGK

SEQ ID NO: 141 - protein, 217 aa, Artificial Sequence
  Description of Artificial Sequence: Synthetic polypeptide
APELLGGPSVFLFPPKPKDTLMISRTPEVTCVVVDVSHEDPEVKFNWYVDGVEVHNAKTKPREEQYNSTYRVVSVLTVLHQDWLNGKEYKCKVSNKALPAPIEKTISKAKGQPREPQVYTLPPSRDELTKNQVSLTCLVKGFYPSDIAVWWESFGTEWASYKTTPPVLDSDGSFFLYSKLTVTKEEWQQGFVFSCSVMHEALHNHYTQKSLSLSPGK

SEQ ID NO: 142 - protein, 217 aa, Artificial Sequence
  Description of Artificial Sequence: Synthetic polypeptide
APELLGGPSVFLFPPKPKDTLMISRTPEVTCVVVDVSHEDPEVKFNWYVDGVEVHNAKTKPREEQYNSTYRVVSVLTVLHQDWLNGKEYKCKVSNKALPAPIEKTISKAKGQPREPQVYTLPPSRDELTKNQVSLTCLVKGFYPSDIAVWWESFGTEWVSYKTTPPVLDSDGSFFLYSKLTVTKEEWQQGFVFSCSVMHEALHNHYTQKSLSLSPGK

SEQ ID NO: 143 - protein, 217 aa, Artificial Sequence
  Description of Artificial Sequence: Synthetic polypeptide
APELLGGPSVFLFPPKPKDTLMISRTPEVTCVVVDVSHEDPEVKFNWYVDGVEVHNAKTKPREEQYNSTYRVVSVLTVLHQDWLNGKEYKCKVSNKALPAPIEKTISKAKGQPREPQVYTLPPSRDELTKNQVSLTCLVKGFYPSDIAVEWESFGTEWSNYKTTPPVLDSDGSFFLYSKLTVTKEEWQQGFVFSCSVMHEALHNHYTQKSLSLSPGK

SEQ ID NO: 144 - protein, 217 aa, Artificial Sequence
  Description of Artificial Sequence: Synthetic polypeptide
APELLGGPSVFLFPPKPKDTLMISRTPEVTCVVVDVSHEDPEVKFNWYVDGVEVHNAKTKPREEQYNSTYRVVSVLTVLHQDWLNGKEYKCKVSNKALPAPIEKTISKAKGQPREPQVYTLPPSRDELTKNQVSLTCLVKGFYPSDIAVEWESYGTEWANYKTTPPVLDSDGSFFLYSKLTVTKEEWQQGFVFSCSVMHEALHNHYTQKSLSLSPGK

SEQ ID NO: 145 - protein, 217 aa, Artificial Sequence
  Description of Artificial Sequence: Synthetic polypeptide
APELLGGPSVFLFPPKPKDTLMISRTPEVTCVVVDVSHEDPEVKFNWYVDGVEVHNAKTKPREEQYNSTYRVVSVLTVLHQDWLNGKEYKCKVSNKALPAPIEKTISKAKGQPREPQVYTLPPSRDELTKNQVSLTCLVKGFYPSDIAVEWESYGTEWVNYKTTPPVLDSDGSFFLYSKLTVTKEEWQQGFVFSCSVMHEALHNHYTQKSLSLSPGK

SEQ ID NO: 146 - protein, 217 aa, Artificial Sequence
  Description of Artificial Sequence: Synthetic polypeptide
APELLGGPSVFLFPPKPKDTLMISRTPEVTCVVVDVSHEDPEVKFNWYVDGVEVHNAKTKPREEQYNSTYRVVSVLTVLHQDWLNGKEYKCKVSNKALPAPIEKTISKAKGQPREPQVYTLPPSRDELTKNQVSLTCLVKGFYPSDIAVEWESYGTEWSNYKTTPPVLDSDGSFFLYSKLTVSKEEWQQGFVFSCSVMHEALHNHYTQKSLSLSPGK

SEQ ID NO: 147 - protein, 217 aa, Artificial Sequence
  Description of Artificial Sequence: Synthetic polypeptide
APELLGGPSVFLFPPKPKDTLMISRTPEVTCVVVDVSHEDPEVKFNWYVDGVEVHNAKTKPREEQYNSTYRVVSVLTVLHQDWLNGKEYKCKVSNKALPAPIEKTISKAKGQPREPQVYTLPPSRDELTKNQVSLTCLVKGFYPSDIAVEWESFGTEWANYKTTPPVLDSDGSFFLYSKLTVTKEEWQQGFVFSCSVMHEALHNHYTQKSLSLSPGK

SEQ ID NO: 148 - protein, 217 aa, Artificial Sequence
  Description of Artificial Sequence: Synthetic polypeptide
APELLGGPSVFLFPPKPKDTLMISRTPEVTCVVVDVSHEDPEVKFNWYVDGVEVHNAKTKPREEQYNSTYRVVSVLTVLHQDWLNGKEYKCKVSNKALPAPIEKTISKAKGQPREPQVYTLPPSRDELTKNQVSLTCLVKGFYPSDIAVEWESFGTEWVNYKTTPPVLDSDGSFFLYSKLTVTKEEWQQGFVFSCSVMHEALHNHYTQKSLSLSPGK

SEQ ID NO: 149 - protein, 217 aa, Artificial Sequence
  Description of Artificial Sequence: Synthetic polypeptide
APELLGGPSVFLFPPKPKDTLMISRTPEVTCVVVDVSHEDPEVKFNWYVDGVEVHNAKTKPREEQYNSTYRVVSVLTVLHQDWLNGKEYKCKVSNKALPAPIEKTISKAKGQPREPQVYTLPPSRDELTKNQVSLTCLVKGFYPSDIAVWWESFGTEWSNYKTTPPVLDSDGSFFLYSKLTVTKEEWQQGFVFSCSVMHEALHNHYTQKSLSLSPGK

SEQ ID NO: 150 - protein, 217 aa, Artificial Sequence
  Description of Artificial Sequence: Synthetic polypeptide
APELLGGPSVFLFPPKPKDTLMISRTPEVTCVVVDVSHEDPEVKFNWYVDGVEVHNAKTKPREEQYNSTYRVVSVLTVLHQDWLNGKEYKCKVSNKALPAPIEKTISKAKGQPREPQVYTLPPSRDELTKNQVSLTCLVKGFYPSDIAVWWESYGTEWANYKTTPPVLDSDGSFFLYSKLTVTKEEWQQGFVFSCSVMHEALHNHYTQKSLSLSPGK

SEQ ID NO: 151 - protein, 217 aa, Artificial Sequence
  Description of Artificial Sequence: Synthetic polypeptide
APELLGGPSVFLFPPKPKDTLMISRTPEVTCVVVDVSHEDPEVKFNWYVDGVEVHNAKTKPREEQYNSTYRVVSVLTVLHQDWLNGKEYKCKVSNKALPAPIEKTISKAKGQPREPQVYTLPPSRDELTKNQVSLTCLVKGFYPSDIAVWWESYGTEWVNYKTTPPVLDSDGSFFLYSKLTVTKEEWQQGFVFSCSVMHEALHNHYTQKSLSLSPGK

SEQ ID NO: 152 - protein, 217 aa, Artificial Sequence
  Description of Artificial Sequence: Synthetic polypeptide
APELLGGPSVFLFPPKPKDTLMISRTPEVTCVVVDVSHEDPEVKFNWYVDGVEVHNAKTKPREEQYNSTYRVVSVLTVLHQDWLNGKEYKCKVSNKALPAPIEKTISKAKGQPREPQVYTLPPSRDELTKNQVSLTCLVKGFYPSDIAVWWESYGTEWSNYKTTPPVLDSDGSFFLYSKLTVSKEEWQQGFVFSCSVMHEALHNHYTQKSLSLSPGK

SEQ ID NO: 153 - protein, 217 aa, Artificial Sequence
  Description of Artificial Sequence: Synthetic polypeptide
APELLGGPSVFLFPPKPKDTLMISRTPEVTCVVVDVSHEDPEVKFNWYVDGVEVHNAKTKPREEQYNSTYRVVSVLTVLHQDWLNGKEYKCKVSNKALPAPIEKTISKAKGQPREPQVYTLPPSRDELTKNQVSLTCLVKGFYPSDIAVWWESFGTEWANYKTTPPVLDSDGSFFLYSKLTVTKEEWQQGFVFSCSVMHEALHNHYTQKSLSLSPGK

SEQ ID NO: 154 - protein, 217 aa, Artificial Sequence
  Description of Artificial Sequence: Synthetic polypeptide
APELLGGPSVFLFPPKPKDTLMISRTPEVTCVVVDVSHEDPEVKFNWYVDGVEVHNAKTKPREEQYNSTYRVVSVLTVLHQDWLNGKEYKCKVSNKALPAPIEKTISKAKGQPREPQVYTLPPSRDELTKNQVSLTCLVKGFYPSDIAVWWESFGTEWVNYKTTPPVLDSDGSFFLYSKLTVTKEEWQQGFVFSCSVMHEALHNHYTQKSLSLSPGK

SEQ ID NO: 155 - protein, 217 aa, Artificial Sequence
  Description of Artificial Sequence: Synthetic polypeptide
APELLGGPSVFLFPPKPKDTLMISRTPEVTCVVVDVSHEDPEVKFNWYVDGVEVHNAKTKPREEQYNSTYRVVSVLTVLHQDWLNGKEYKCKVSNKALPAPIEKTISKAKGQPREPQVYTLPPSRDELTKNQVSLTCLVKGFYPSDIAVLWESFGTEWSSYKTTPPVLDSDGSFFLYSKLTVTKEEWQQGFVFSCSVMHEALHNHYTQKSLSLSPGK

SEQ ID NO: 156 - protein, 217 aa, Artificial Sequence
  Description of Artificial Sequence: Synthetic polypeptide
APELLGGPSVFLFPPKPKDTLMISRTPEVTCVVVDVSHEDPEVKFNWYVDGVEVHNAKTKPREEQYNSTYRVVSVLTVLHQDWLNGKEYKCKVSNKALPAPIEKTISKAKGQPREPQVYTLPPSRDELTKNQVSLTCLVKGFYPSDIAVLWESYGTEWASYKTTPPVLDSDGSFFLYSKLTVTKEEWQQGFVFSCSVMHEALHNHYTQKSLSLSPGK

SEQ ID NO: 157 - protein, 217 aa, Artificial Sequence
  Description of Artificial Sequence: Synthetic polypeptide
APELLGGPSVFLFPPKPKDTLMISRTPEVTCVVVDVSHEDPEVKFNWYVDGVEVHNAKTKPREEQYNSTYRVVSVLTVLHQDWLNGKEYKCKVSNKALPAPIEKTISKAKGQPREPQVYTLPPSRDELTKNQVSLTCLVKGFYPSDIAVLWESYGTEWVSYKTTPPVLDSDGSFFLYSKLTVTKEEWQQGFVFSCSVMHEALHNHYTQKSLSLSPGK

SEQ ID NO: 158 - protein, 217 aa, Artificial Sequence
  Description of Artificial Sequence: Synthetic polypeptide
APELLGGPSVFLFPPKPKDTLMISRTPEVTCVVVDVSHEDPEVKFNWYVDGVEVHNAKTKPREEQYNSTYRVVSVLTVLHQDWLNGKEYKCKVSNKALPAPIEKTISKAKGQPREPQVYTLPPSRDELTKNQVSLTCLVKGFYPSDIAVLWESYGTEWSSYKTTPPVLDSDGSFFLYSKLTVSKEEWQQGFVFSCSVMHEALHNHYTQKSLSLSPGK

SEQ ID NO: 159 - protein, 217 aa, Artificial Sequence
  Description of Artificial Sequence: Synthetic polypeptide
APELLGGPSVFLFPPKPKDTLMISRTPEVTCVVVDVSHEDPEVKFNWYVDGVEVHNAKTKPREEQYNSTYRVVSVLTVLHQDWLNGKEYKCKVSNKALPAPIEKTISKAKGQPREPQVYTLPPSRDELTKNQVSLTCLVKGFYPSDIAVLWESFGTEWASYKTTPPVLDSDGSFFLYSKLTVTKEEWQQGFVFSCSVMHEALHNHYTQKSLSLSPGK

SEQ ID NO: 160 - protein, 217 aa, Artificial Sequence
  Description of Artificial Sequence: Synthetic polypeptide
APELLGGPSVFLFPPKPKDTLMISRTPEVTCVVVDVSHEDPEVKFNWYVDGVEVHNAKTKPREEQYNSTYRVVSVLTVLHQDWLNGKEYKCKVSNKALPAPIEKTISKAKGQPREPQVYTLPPSRDELTKNQVSLTCLVKGFYPSDIAVLWESFGTEWVSYKTTPPVLDSDGSFFLYSKLTVTKEEWQQGFVFSCSVMHEALHNHYTQKSLSLSPGK

SEQ ID NO: 161 - protein, 217 aa, Artificial Sequence; identical to SEQ ID NO: 27
  Description of Artificial Sequence: Synthetic polypeptide

SEQ ID NO: 162 - protein, 217 aa, Artificial Sequence
  Description of Artificial Sequence: Synthetic polypeptide
APELLGGPSVFLFPPKPKDTLMISRTPEVTCVVVDVSHEDPEVKFNWYVDGVEVHNAKTKPREEQYNSTYRVVSVLTVLHQDWLNGKEYKCKVSNKALPAPIEKTISKAKGQPREPQVYTLPPSRDELTKNQVSLTCLVKGFYPSDIAVWWESLGHVWVNQKTTPPVLDSDGSFFLYSKLTVPKSTWQQGWVFSCSVMHEALHNHYTQKSLSLSPGK

SEQ ID NO: 163 - protein, 217 aa, Artificial Sequence
  Description of Artificial Sequence: Synthetic polypeptide
APELLGGPSVFLFPPKPKDTLMISRTPEVTCVVVDVSHEDPEVKFNWYVDGVEVHNAKTKPREEQYNSTYRVVSVLTVLHQDWLNGKEYKCKVSNKALPAPIEKTISKAKGQPREPQVYTLPPSRDELTKNQVSLTCLVKGFYPSDIAVEWESLGHVWVNQQTTPPVLDSDGSFFLYSKLTVPKSTWQQGWVFSCSVMHEALHNHYTQKSLSLSPGK

SEQ ID NO: 164 - protein, 217 aa, Artificial Sequence
  Description of Artificial Sequence: Synthetic polypeptide
APELLGGPSVFLFPPKPKDTLMISRTPEVTCVVVDVSHEDPEVKFNWYVDGVEVHNAKTKPREEQYNSTYRVVSVLTVLHQDWLNGKEYKCKVSNKALPAPIEKTISKAKGQPREPQVYTLPPSRDELTKNQVSLTCLVKGFYPSDIAVWWESLGHVWVNQQTTPPVLDSDGSFFLYSKLTVPKSTWQQGWVFSCSVMHEALHNHYTQKSLSLSPGK

SEQ ID NO: 165 - protein, 217 aa, Artificial Sequence
  Description of Artificial Sequence: Synthetic polypeptide
APEAAGGPSVFLFPPKPKDTLYITREPEVTCVVVDVSHEDPEVKFNWYVDGVEVHNAKTKPREEQYNSTYRVVSVLTVLHQDWLNGKEYKCKVSNKALGAPIEKTISKAKGQPREPQVYTLPPSRDELTKNQVSLTCLVKGFYPSDIAVEWESYGTEWSSYKTTPPVLDSDGSFFLYSKLTVTKEEWQQGFVFSCSVMHEALHNHYTQKSLSLSPGK

SEQ ID NO: 166 - protein, 217 aa, Artificial Sequence
  Description of Artificial Sequence: Synthetic polypeptide
APEAAGGPSVFLFPPKPKDTLYITREPEVTCVVVDVSHEDPEVKFNWYVDGVEVHNAKTKPREEQYNSTYRVVSVLTVLHQDWLNGKEYKCKVSNKALGAPIEKTISKAKGQPREPQVYTLPPSRDELTKNQVSLTCLVKGFYPSDIAVEWESFGTEWSSYKTTPPVLDSDGSFFLYSKLTVTKEEWQQGFVFSCSVMHEALHNHYTQKSLSLSPGK

SEQ ID NO: 167 - protein, 217 aa, Artificial Sequence
  Description of Artificial Sequence: Synthetic polypeptide
APELLGGPSVFLFPPKPKDTLMISRTPEVTCVVVDVSHEDPEVKFNWYVDGVEVHNAKTKPREEQYNSTYRVVSVLTVLHQDWLNGKEYKCKVSNKALPAPIEKTISKAKGQPREPQVYTLPPSRDELTKNQVSLWCLVKGFYPSDIAVEWESFGTEWSSYKTTPPVLDSDGSFFLYSKLTVTKEEWQQGFVFSCSVMHEALHNHYTQKSLSLSPGK

SEQ ID NO: 168 - protein, 217 aa, Artificial Sequence
  Description of Artificial Sequence: Synthetic polypeptide
APEAAGGPSVFLFPPKPKDTLMISRTPEVTCVVVDVSHEDPEVKFNWYVDGVEVHNAKTKPREEQYNSTYRVVSVLTVLHQDWLNGKEYKCKVSNKALPAPIEKTISKAKGQPREPQVYTLPPSRDELTKNQVSLWCLVKGFYPSDIAVEWESFGTEWSSYKTTPPVLDSDGSFFLYSKLTVTKEEWQQGFVFSCSVMHEALHNHYTQKSLSLSPGK

SEQ ID NO: 169 - protein, 217 aa, Artificial Sequence
  Description of Artificial Sequence: Synthetic polypeptide
APEAAGGPSVFLFPPKPKDTLMISRTPEVTCVVVDVSHEDPEVKFNWYVDGVEVHNAKTKPREEQYNSTYRVVSVLTVLHQDWLNGKEYKCKVSNKALGAPIEKTISKAKGQPREPQVYTLPPSRDELTKNQVSLWCLVKGFYPSDIAVEWESFGTEWSSYKTTPPVLDSDGSFFLYSKLTVTKEEWQQGFVFSCSVMHEALHNHYTQKSLSLSPGK

SEQ ID NO: 170 - protein, 217 aa, Artificial Sequence
  Description of Artificial Sequence: Synthetic polypeptide
APELLGGPSVFLFPPKPKDTLYITREPEVTCVVVDVSHEDPEVKFNWYVDGVEVHNAKTKPREEQYNSTYRVVSVLTVLHQDWLNGKEYKCKVSNKALPAPIEKTISKAKGQPREPQVYTLPPSRDELTKNQVSLWCLVKGFYPSDIAVEWESFGTEWSSYKTTPPVLDSDGSFFLYSKLTVTKEEWQQGFVFSCSVMHEALHNHYTQKSLSLSPGK

SEQ ID NO: 171 - protein, 217 aa, Artificial Sequence
  Description of Artificial Sequence: Synthetic polypeptide
APEAAGGPSVFLFPPKPKDTLYITREPEVTCVVVDVSHEDPEVKFNWYVDGVEVHNAKTKPREEQYNSTYRVVSVLTVLHQDWLNGKEYKCKVSNKALPAPIEKTISKAKGQPREPQVYTLPPSRDELTKNQVSLWCLVKGFYPSDIAVEWESFGTEWSSYKTTPPVLDSDGSFFLYSKLTVTKEEWQQGFVFSCSVMHEALHNHYTQKSLSLSPGK

SEQ ID NO: 172 - protein, 217 aa, Artificial Sequence
  Description of Artificial Sequence: Synthetic polypeptide
APEAAGGPSVFLFPPKPKDTLYITREPEVTCVVVDVSHEDPEVKFNWYVDGVEVHNAKTKPREEQYNSTYRVVSVLTVLHQDWLNGKEYKCKVSNKALGAPIEKTISKAKGQPREPQVYTLPPSRDELTKNQVSLWCLVKGFYPSDIAVEWESFGTEWSSYKTTPPVLDSDGSFFLYSKLTVTKEEWQQGFVFSCSVMHEALHNHYTQKSLSLSPGK

SEQ ID NO: 173 - protein, 217 aa, Artificial Sequence
  Description of Artificial Sequence: Synthetic polypeptide
APELLGGPSVFLFPPKPKDTLMISRTPEVTCVVVDVSHEDPEVKFNWYVDGVEVHNAKTKPREEQYNSTYRVVSVLTVLHQDWLNGKEYKCKVSNKALPAPIEKTISKAKGQPREPQVYTLPPSRDELTKNQVSLSCAVKGFYPSDIAVEWESFGTEWSSYKTTPPVLDSDGSFFLVSKLTVTKEEWQQGFVFSCSVMHEALHNHYTQKSLSLSPGK

SEQ ID NO: 174 - protein, 217 aa, Artificial Sequence
  Description of Artificial Sequence: Synthetic polypeptide
APEAAGGPSVFLFPPKPKDTLMISRTPEVTCVVVDVSHEDPEVKFNWYVDGVEVHNAKTKPREEQYNSTYRVVSVLTVLHQDWLNGKEYKCKVSNKALPAPIEKTISKAKGQPREPQVYTLPPSRDELTKNQVSLSCAVKGFYPSDIAVEWESFGTEWSSYKTTPPVLDSDGSFFLVSKLTVTKEEWQQGFVFSCSVMHEALHNHYTQKSLSLSPGK

SEQ ID NO: 175 - protein, 217 aa, Artificial Sequence
  Description of Artificial Sequence: Synthetic polypeptide
APEAAGGPSVFLFPPKPKDTLMISRTPEVTCVVVDVSHEDPEVKFNWYVDGVEVHNAKTKPREEQYNSTYRVVSVLTVLHQDWLNGKEYKCKVSNKALGAPIEKTISKAKGQPREPQVYTLPPSRDELTKNQVSLSCAVKGFYPSDIAVEWESFGTEWSSYKTTPPVLDSDGSFFLVSKLTVTKEEWQQGFVFSCSVMHEALHNHYTQKSLSLSPGK

SEQ ID NO: 176 - protein, 217 aa, Artificial Sequence
  Description of Artificial Sequence: Synthetic polypeptide
APELLGGPSVFLFPPKPKDTLYITREPEVTCVVVDVSHEDPEVKFNWYVDGVEVHNAKTKPREEQYNSTYRVVSVLTVLHQDWLNGKEYKCKVSNKALPAPIEKTISKAKGQPREPQVYTLPPSRDELTKNQVSLSCAVKGFYPSDIAVEWESFGTEWSSYKTTPPVLDSDGSFFLVSKLTVTKEEWQQGFVFSCSVMHEALHNHYTQKSLSLSPGK

SEQ ID NO: 177 - protein, 217 aa, Artificial Sequence
  Description of Artificial Sequence: Synthetic polypeptide
APEAAGGPSVFLFPPKPKDTLYITREPEVTCVVVDVSHEDPEVKFNWYVDGVEVHNAKTKPREEQYNSTYRVVSVLTVLHQDWLNGKEYKCKVSNKALPAPIEKTISKAKGQPREPQVYTLPPSRDELTKNQVSLSCAVKGFYPSDIAVEWESFGTEWSSYKTTPPVLDSDGSFFLVSKLTVTKEEWQQGFVFSCSVMHEALHNHYTQKSLSLSPGK

SEQ ID NO: 178 - protein, 217 aa, Artificial Sequence
  Description of Artificial Sequence: Synthetic polypeptide
APEAAGGPSVFLFPPKPKDTLYITREPEVTCVVVDVSHEDPEVKFNWYVDGVEVHNAKTKPREEQYNSTYRVVSVLTVLHQDWLNGKEYKCKVSNKALGAPIEKTISKAKGQPREPQVYTLPPSRDELTKNQVSLSCAVKGFYPSDIAVEWESFGTEWSSYKTTPPVLDSDGSFFLVSKLTVTKEEWQQGFVFSCSVMHEALHNHYTQKSLSLSPGK

SEQ ID NO: 179 - protein, 217 aa, Artificial Sequence
  Description of Artificial Sequence: Synthetic polypeptide
APELLGGPSVFLFPPKPKDTLMISRTPEVTCVVVDVSHEDPEVKFNWYVDGVEVHNAKTKPREEQYNSTYRVVSVLTVLHQDWLNGKEYKCKVSNKALPAPIEKTISKAKGQPREPQVYTLPPSRDELTKNQVSLWCLVKGFYPSDIAVEWESYGTEWANYKTTPPVLDSDGSFFLYSKLTVTKEEWQQGFVFSCSVMHEALHNHYTQKSLSLSPGK

SEQ ID NO: 180 - protein, 217 aa, Artificial Sequence
  Description of Artificial Sequence: Synthetic polypeptide
APEAAGGPSVFLFPPKPKDTLMISRTPEVTCVVVDVSHEDPEVKFNWYVDGVEVHNAKTKPREEQYNSTYRVVSVLTVLHQDWLNGKEYKCKVSNKALPAPIEKTISKAKGQPREPQVYTLPPSRDELTKNQVSLWCLVKGFYPSDIAVEWESYGTEWANYKTTPPVLDSDGSFFLYSKLTVTKEEWQQGFVFSCSVMHEALHNHYTQKSLSLSPGK

SEQ ID NO: 181 - protein, 217 aa, Artificial Sequence
  Description of Artificial Sequence: Synthetic polypeptide
APEAAGGPSVFLFPPKPKDTLMISRTPEVTCVVVDVSHEDPEVKFNWYVDGVEVHNAKTKPREEQYNSTYRVVSVLTVLHQDWLNGKEYKCKVSNKALGAPIEKTISKAKGQPREPQVYTLPPSRDELTKNQVSLWCLVKGFYPSDIAVEWESYGTEWANYKTTPPVLDSDGSFFLYSKLTVTKEEWQQGFVFSCSVMHEALHNHYTQKSLSLSPGK

SEQ ID NO: 182 - protein, 217 aa, Artificial Sequence
  Description of Artificial Sequence: Synthetic polypeptide
APELLGGPSVFLFPPKPKDTLYITREPEVTCVVVDVSHEDPEVKFNWYVDGVEVHNAKTKPREEQYNSTYRVVSVLTVLHQDWLNGKEYKCKVSNKALPAPIEKTISKAKGQPREPQVYTLPPSRDELTKNQVSLWCLVKGFYPSDIAVEWESYGTEWANYKTTPPVLDSDGSFFLYSKLTVTKEEWQQGFVFSCSVMHEALHNHYTQKSLSLSPGK

SEQ ID NO: 183 - protein, 217 aa, Artificial Sequence
  Description of Artificial Sequence: Synthetic polypeptide
APEAAGGPSVFLFPPKPKDTLYITREPEVTCVVVDVSHEDPEVKFNWYVDGVEVHNAKTKPREEQYNSTYRVVSVLTVLHQDWLNGKEYKCKVSNKALPAPIEKTISKAKGQPREPQVYTLPPSRDELTKNQVSLWCLVKGFYPSDIAVEWESYGTEWANYKTTPPVLDSDGSFFLYSKLTVTKEEWQQGFVFSCSVMHEALHNHYTQKSLSLSPGK

SEQ ID NO: 184 - protein, 217 aa, Artificial Sequence
  Description of Artificial Sequence: Synthetic polypeptide
APEAAGGPSVFLFPPKPKDTLYITREPEVTCVVVDVSHEDPEVKFNWYVDGVEVHNAKTKPREEQYNSTYRVVSVLTVLHQDWLNGKEYKCKVSNKALGAPIEKTISKAKGQPREPQVYTLPPSRDELTKNQVSLWCLVKGFYPSDIAVEWESYGTEWANYKTTPPVLDSDGSFFLYSKLTVTKEEWQQGFVFSCSVMHEALHNHYTQKSLSLSPGK

SEQ ID NO: 185 - protein, 217 aa, Artificial Sequence
  Description of Artificial Sequence: Synthetic polypeptide
APELLGGPSVFLFPPKPKDTLMISRTPEVTCVVVDVSHEDPEVKFNWYVDGVEVHNAKTKPREEQYNSTYRVVSVLTVLHQDWLNGKEYKCKVSNKALPAPIEKTISKAKGQPREPQVYTLPPSRDELTKNQVSLSCAVKGFYPSDIAVEWESYGTEWANYKTTPPVLDSDGSFFLVSKLTVTKEEWQQGFVFSCSVMHEALHNHYTQKSLSLSPGK

SEQ ID NO: 186 - protein, 217 aa, Artificial Sequence
  Description of Artificial Sequence: Synthetic polypeptide
APEAAGGPSVFLFPPKPKDTLMISRTPEVTCVVVDVSHEDPEVKFNWYVDGVEVHNAKTKPREEQYNSTYRVVSVLTVLHQDWLNGKEYKCKVSNKALPAPIEKTISKAKGQPREPQVYTLPPSRDELTKNQVSLSCAVKGFYPSDIAVEWESYGTEWANYKTTPPVLDSDGSFFLVSKLTVTKEEWQQGFVFSCSVMHEALHNHYTQKSLSLSPGK

SEQ ID NO: 187 - protein, 217 aa, Artificial Sequence
  Description of Artificial Sequence: Synthetic polypeptide
APEAAGGPSVFLFPPKPKDTLMISRTPEVTCVVVDVSHEDPEVKFNWYVDGVEVHNAKTKPREEQYNSTYRVVSVLTVLHQDWLNGKEYKCKVSNKALGAPIEKTISKAKGQPREPQVYTLPPSRDELTKNQVSLSCAVKGFYPSDIAVEWESYGTEWANYKTTPPVLDSDGSFFLVSKLTVTKEEWQQGFVFSCSVMHEALHNHYTQKSLSLSPGK

SEQ ID NO: 188 - protein, 217 aa, Artificial Sequence
  Description of Artificial Sequence: Synthetic polypeptide
APELLGGPSVFLFPPKPKDTLYITREPEVTCVVVDVSHEDPEVKFNWYVDGVEVHNAKTKPREEQYNSTYRVVSVLTVLHQDWLNGKEYKCKVSNKALPAPIEKTISKAKGQPREPQVYTLPPSRDELTKNQVSLSCAVKGFYPSDIAVEWESYGTEWANYKTTPPVLDSDGSFFLVSKLTVTKEEWQQGFVFSCSVMHEALHNHYTQKSLSLSPGK

SEQ ID NO: 189 - protein, 217 aa, Artificial Sequence
  Description of Artificial Sequence: Synthetic polypeptide
APEAAGGPSVFLFPPKPKDTLYITREPEVTCVVVDVSHEDPEVKFNWYVDGVEVHNAKTKPREEQYNSTYRVVSVLTVLHQDWLNGKEYKCKVSNKALPAPIEKTISKAKGQPREPQVYTLPPSRDELTKNQVSLSCAVKGFYPSDIAVEWESYGTEWANYKTTPPVLDSDGSFFLVSKLTVTKEEWQQGFVFSCSVMHEALHNHYTQKSLSLSPGK

SEQ ID NO: 190 - protein, 217 aa, Artificial Sequence
  Description of Artificial Sequence: Synthetic polypeptide
APEAAGGPSVFLFPPKPKDTLYITREPEVTCVVVDVSHEDPEVKFNWYVDGVEVHNAKTKPREEQYNSTYRVVSVLTVLHQDWLNGKEYKCKVSNKALGAPIEKTISKAKGQPREPQVYTLPPSRDELTKNQVSLSCAVKGFYPSDIAVEWESYGTEWANYKTTPPVLDSDGSFFLVSKLTVTKEEWQQGFVFSCSVMHEALHNHYTQKSLSLSPGK

SEQ ID NO: 191 - protein, 217 aa, Artificial Sequence
  Description of Artificial Sequence: Synthetic polypeptide
APELLGGPSVFLFPPKPKDTLMISRTPEVTCVVVDVSHEDPEVKFNWYVDGVEVHNAKTKPREEQYNSTYRVVSVLTVLHQDWLNGKEYKCKVSNKALPAPIEKTISKAKGQPREPQVYTLPPSRDELTKNQVSLWCLVKGFYPSDIAVEWESYGTEWVNYKTTPPVLDSDGSFFLYSKLTVTKEEWQQGFVFSCSVMHEALHNHYTQKSLSLSPGK

SEQ ID NO: 192 - protein, 217 aa, Artificial Sequence
  Description of Artificial Sequence: Synthetic polypeptide
APEAAGGPSVFLFPPKPKDTLMISRTPEVTCVVVDVSHEDPEVKFNWYVDGVEVHNAKTKPREEQYNSTYRVVSVLTVLHQDWLNGKEYKCKVSNKALPAPIEKTISKAKGQPREPQVYTLPPSRDELTKNQVSLWCLVKGFYPSDIAVEWESYGTEWVNYKTTPPVLDSDGSFFLYSKLTVTKEEWQQGFVFSCSVMHEALHNHYTQKSLSLSPGK

SEQ ID NO: 193 - protein, 217 aa, Artificial Sequence
  Description of Artificial Sequence: Synthetic polypeptide
APEAAGGPSVFLFPPKPKDTLMISRTPEVTCVVVDVSHEDPEVKFNWYVDGVEVHNAKTKPREEQYNSTYRVVSVLTVLHQDWLNGKEYKCKVSNKALGAPIEKTISKAKGQPREPQVYTLPPSRDELTKNQVSLWCLVKGFYPSDIAVEWESYGTEWVNYKTTPPVLDSDGSFFLYSKLTVTKEEWQQGFVFSCSVMHEALHNHYTQKSLSLSPGK

SEQ ID NO: 194 - protein, 217 aa, Artificial Sequence
  Description of Artificial Sequence: Synthetic polypeptide
APELLGGPSVFLFPPKPKDTLYITREPEVTCVVVDVSHEDPEVKFNWYVDGVEVHNAKTKPREEQYNSTYRVVSVLTVLHQDWLNGKEYKCKVSNKALPAPIEKTISKAKGQPREPQVYTLPPSRDELTKNQVSLWCLVKGFYPSDIAVEWESYGTEWVNYKTTPPVLDSDGSFFLYSKLTVTKEEWQQGFVFSCSVMHEALHNHYTQKSLSLSPGK

SEQ ID NO: 195 - protein, 217 aa, Artificial Sequence
  Description of Artificial Sequence: Synthetic polypeptide
APEAAGGPSVFLFPPKPKDTLYITREPEVTCVVVDVSHEDPEVKFNWYVDGVEVHNAKTKPREEQYNSTYRVVSVLTVLHQDWLNGKEYKCKVSNKALPAPIEKTISKAKGQPREPQVYTLPPSRDELTKNQVSLWCLVKGFYPSDIAVEWESYGTEWVNYKTTPPVLDSDGSFFLYSKLTVTKEEWQQGFVFSCSVMHEALHNHYTQKSLSLSPGK

SEQ ID NO: 196 - protein, 217 aa, Artificial Sequence
  Description of Artificial Sequence: Synthetic polypeptide
APEAAGGPSVFLFPPKPKDTLYITREPEVTCVVVDVSHEDPEVKFNWYVDGVEVHNAKTKPREEQYNSTYRVVSVLTVLHQDWLNGKEYKCKVSNKALGAPIEKTISKAKGQPREPQVYTLPPSRDELTKNQVSLWCLVKGFYPSDIAVEWESYGTEWVNYKTTPPVLDSDGSFFLYSKLTVTKEEWQQGFVFSCSVMHEALHNHYTQKSLSLSPGK

SEQ ID NO: 197 - protein, 217 aa, Artificial Sequence
  Description of Artificial Sequence: Synthetic polypeptide
APELLGGPSVFLFPPKPKDTLMISRTPEVTCVVVDVSHEDPEVKFNWYVDGVEVHNAKTKPREEQYNSTYRVVSVLTVLHQDWLNGKEYKCKVSNKALPAPIEKTISKAKGQPREPQVYTLPPSRDELTKNQVSLSCAVKGFYPSDIAVEWESYGTEWVNYKTTPPVLDSDGSFFLVSKLTVTKEEWQQGFVFSCSVMHEALHNHYTQKSLSLSPGK

SEQ ID NO: 198 - protein, 217 aa, Artificial Sequence
  Description of Artificial Sequence: Synthetic polypeptide
APEAAGGPSVFLFPPKPKDTLMISRTPEVTCVVVDVSHEDPEVKFNWYVDGVEVHNAKTKPREEQYNSTYRVVSVLTVLHQDWLNGKEYKCKVSNKALPAPIEKTISKAKGQPREPQVYTLPPSRDELTKNQVSLSCAVKGFYPSDIAVEWESYGTEWVNYKTTPPVLDSDGSFFLVSKLTVTKEEWQQGFVFSCSVMHEALHNHYTQKSLSLSPGK

SEQ ID NO: 199 - protein, 217 aa, Artificial Sequence
  Description of Artificial Sequence: Synthetic polypeptide
APEAAGGPSVFLFPPKPKDTLMISRTPEVTCVVVDVSHEDPEVKFNWYVDGVEVHNAKTKPREEQYNSTYRVVSVLTVLHQDWLNGKEYKCKVSNKALGAPIEKTISKAKGQPREPQVYTLPPSRDELTKNQVSLSCAVKGFYPSDIAVEWESYGTEWVNYKTTPPVLDSDGSFFLVSKLTVTKEEWQQGFVFSCSVMHEALHNHYTQKSLSLSPGK

SEQ ID NO: 200 - protein, 217 aa, Artificial Sequence
  Description of Artificial Sequence: Synthetic polypeptide
APELLGGPSVFLFPPKPKDTLYITREPEVTCVVVDVSHEDPEVKFNWYVDGVEVHNAKTKPREEQYNSTYRVVSVLTVLHQDWLNGKEYKCKVSNKALPAPIEKTISKAKGQPREPQVYTLPPSRDELTKNQVSLSCAVKGFYPSDIAVEWESYGTEWVNYKTTPPVLDSDGSFFLVSKLTVTKEEWQQGFVFSCSVMHEALHNHYTQKSLSLSPGK

SEQ ID NO: 201 - protein, 217 aa, Artificial Sequence
  Description of Artificial Sequence: Synthetic polypeptide
APEAAGGPSVFLFPPKPKDTLYITREPEVTCVVVDVSHEDPEVKFNWYVDGVEVHNAKTKPREEQYNSTYRVVSVLTVLHQDWLNGKEYKCKVSNKALPAPIEKTISKAKGQPREPQVYTLPPSRDELTKNQVSLSCAVKGFYPSDIAVEWESYGTEWVNYKTTPPVLDSDGSFFLVSKLTVTKEEWQQGFVFSCSVMHEALHNHYTQKSLSLSPGK

SEQ ID NO: 202 - protein, 217 aa, Artificial Sequence
  Description of Artificial Sequence: Synthetic polypeptide
APEAAGGPSVFLFPPKPKDTLYITREPEVTCVVVDVSHEDPEVKFNWYVDGVEVHNAKTKPREEQYNSTYRVVSVLTVLHQDWLNGKEYKCKVSNKALGAPIEKTISKAKGQPREPQVYTLPPSRDELTKNQVSLSCAVKGFYPSDIAVEWESYGTEWVNYKTTPPVLDSDGSFFLVSKLTVTKEEWQQGFVFSCSVMHEALHNHYTQKSLSLSPGK

SEQ ID NO: 203 - protein, 217 aa, Artificial Sequence
  Description of Artificial Sequence: Synthetic polypeptide
APELLGGPSVFLFPPKPKDTLMISRTPEVTCVVVDVSHEDPEVKFNWYVDGVEVHNAKTKPREEQYNSTYRVVSVLTVLHQDWLNGKEYKCKVSNKALPAPIEKTISKAKGQPREPQVYTLPPSRDELTKNQVSLWCLVKGFYPSDIAVEWESYGTEWSNYKTTPPVLDSDGSFFLYSKLTVSKEEWQQGFVFSCSVMHEALHNHYTQKSLSLSPGK

SEQ ID NO: 204 - protein, 217 aa, Artificial Sequence
  Description of Artificial Sequence: Synthetic polypeptide
APEAAGGPSVFLFPPKPKDTLMISRTPEVTCVVVDVSHEDPEVKFNWYVDGVEVHNAKTKPREEQYNSTYRVVSVLTVLHQDWLNGKEYKCKVSNKALPAPIEKTISKAKGQPREPQVYTLPPSRDELTKNQVSLWCLVKGFYPSDIAVEWESYGTEWSNYKTTPPVLDSDGSFFLYSKLTVSKEEWQQGFVFSCSVMHEALHNHYTQKSLSLSPGK

SEQ ID NO: 205 - protein, 217 aa, Artificial Sequence
  Description of Artificial Sequence: Synthetic polypeptide
APEAAGGPSVFLFPPKPKDTLMISRTPEVTCVVVDVSHEDPEVKFNWYVDGVEVHNAKTKPREEQYNSTYRVVSVLTVLHQDWLNGKEYKCKVSNKALGAPIEKTISKAKGQPREPQVYTLPPSRDELTKNQVSLWCLVKGFYPSDIAVEWESYGTEWSNYKTTPPVLDSDGSFFLYSKLTVSKEEWQQGFVFSCSVMHEALHNHYTQKSLSLSPGK

SEQ ID NO: 206 - protein, 217 aa, Artificial Sequence
  Description of Artificial Sequence: Synthetic polypeptide
APELLGGPSVFLFPPKPKDTLYITREPEVTCVVVDVSHEDPEVKFNWYVDGVEVHNAKTKPREEQYNSTYRVVSVLTVLHQDWLNGKEYKCKVSNKALPAPIEKTISKAKGQPREPQVYTLPPSRDELTKNQVSLWCLVKGFYPSDIAVEWESYGTEWSNYKTTPPVLDSDGSFFLYSKLTVSKEEWQQGFVFSCSVMHEALHNHYTQKSLSLSPGK

SEQ ID NO: 207 - protein, 217 aa, Artificial Sequence
  Description of Artificial Sequence: Synthetic polypeptide
APEAAGGPSVFLFPPKPKDTLYITREPEVTCVVVDVSHEDPEVKFNWYVDGVEVHNAKTKPREEQYNSTYRVVSVLTVLHQDWLNGKEYKCKVSNKALPAPIEKTISKAKGQPREPQVYTLPPSRDELTKNQVSLWCLVKGFYPSDIAVEWESYGTEWSNYKTTPPVLDSDGSFFLYSKLTVSKEEWQQGFVFSCSVMHEALHNHYTQKSLSLSPGK

SEQ ID NO: 208 - protein, 217 aa, Artificial Sequence
  Description of Artificial Sequence: Synthetic polypeptide
APEAAGGPSVFLFPPKPKDTLYITREPEVTCVVVDVSHEDPEVKFNWYVDGVEVHNAKTKPREEQYNSTYRVVSVLTVLHQDWLNGKEYKCKVSNKALGAPIEKTISKAKGQPREPQVYTLPPSRDELTKNQVSLWCLVKGFYPSDIAVEWESYGTEWSNYKTTPPVLDSDGSFFLYSKLTVSKEEWQQGFVFSCSVMHEALHNHYTQKSLSLSPGK

SEQ ID NO: 209 - protein, 217 aa, Artificial Sequence
  Description of Artificial Sequence: Synthetic polypeptide
APELLGGPSVFLFPPKPKDTLMISRTPEVTCVVVDVSHEDPEVKFNWYVDGVEVHNAKTKPREEQYNSTYRVVSVLTVLHQDWLNGKEYKCKVSNKALPAPIEKTISKAKGQPREPQVYTLPPSRDELTKNQVSLSCAVKGFYPSDIAVEWESYGTEWSNYKTTPPVLDSDGSFFLVSKLTVSKEEWQQGFVFSCSVMHEALHNHYTQKSLSLSPGK

SEQ ID NO: 210 - protein, 217 aa, Artificial Sequence
  Description of Artificial Sequence: Synthetic polypeptide
APEAAGGPSVFLFPPKPKDTLMISRTPEVTCVVVDVSHEDPEVKFNWYVDGVEVHNAKTKPREEQYNSTYRVVSVLTVLHQDWLNGKEYKCKVSNKALPAPIEKTISKAKGQPREPQVYTLPPSRDELTKNQVSLSCAVKGFYPSDIAVEWESYGTEWSNYKTTPPVLDSDGSFFLVSKLTVSKEEWQQGFVFSCSVMHEALHNHYTQKSLSLSPGK

SEQ ID NO: 211 - protein, 217 aa, Artificial Sequence
  Description of Artificial Sequence: Synthetic polypeptide
APEAAGGPSVFLFPPKPKDTLMISRTPEVTCVVVDVSHEDPEVKFNWYVDGVEVHNAKTKPREEQYNSTYRVVSVLTVLHQDWLNGKEYKCKVSNKALGAPIEKTISKAKGQPREPQVYTLPPSRDELTKNQVSLSCAVKGFYPSDIAVEWESYGTEWSNYKTTPPVLDSDGSFFLVSKLTVSKEEWQQGFVFSCSVMHEALHNHYTQKSLSLSPGK

SEQ ID NO: 212 - protein, 217 aa, Artificial Sequence
  Description of Artificial Sequence: Synthetic polypeptide
APELLGGPSVFLFPPKPKDTLYITREPEVTCVVVDVSHEDPEVKFNWYVDGVEVHNAKTKPREEQYNSTYRVVSVLTVLHQDWLNGKEYKCKVSNKALPAPIEKTISKAKGQPREPQVYTLPPSRDELTKNQVSLSCAVKGFYPSDIAVEWESYGTEWSNYKTTPPVLDSDGSFFLVSKLTVSKEEWQQGFVFSCSVMHEALHNHYTQKSLSLSPGK

SEQ ID NO: 213 - protein, 217 aa, Artificial Sequence
  Description of Artificial Sequence: Synthetic polypeptide
APEAAGGPSVFLFPPKPKDTLYITREPEVTCVVVDVSHEDPEVKFNWYVDGVEVHNAKTKPREEQYNSTYRVVSVLTVLHQDWLNGKEYKCKVSNKALPAPIEKTISKAKGQPREPQVYTLPPSRDELTKNQVSLSCAVKGFYPSDIAVEWESYGTEWSNYKTTPPVLDSDGSFFLVSKLTVSKEEWQQGFVFSCSVMHEALHNHYTQKSLSLSPGK

SEQ ID NO: 214 - protein, 217 aa, Artificial Sequence
  Description of Artificial Sequence: Synthetic polypeptide
APEAAGGPSVFLFPPKPKDTLYITREPEVTCVVVDVSHEDPEVKFNWYVDGVEVHNAKTKPREEQYNSTYRVVSVLTVLHQDWLNGKEYKCKVSNKALGAPIEKTISKAKGQPREPQVYTLPPSRDELTKNQVSLSCAVKGFYPSDIAVEWESYGTEWSNYKTTPPVLDSDGSFFLVSKLTVSKEEWQQGFVFSCSVMHEALHNHYTQKSLSLSPGK

SEQ ID NO: 215 - protein, 217 aa, Artificial Sequence
  Description of Artificial Sequence: Synthetic polypeptide
APELLGGPSVFLFPPKPKDTLMISRTPEVTCVVVDVSHEDPEVKFNWYVDGVEVHNAKTKPREEQYNSTYRVVSVLTVLHQDWLNGKEYKCKVSNKALPAPIEKTISKAKGQPREPQVYTLPPSRDELTKNQVSLWCLVKGFYPSDIAVLWESYGTEWASYKTTPPVLDSDGSFFLYSKLTVTKEEWQQGFVFSCSVMHEALHNHYTQKSLSLSPGK

SEQ ID NO: 216 - protein, 217 aa, Artificial Sequence
  Description of Artificial Sequence: Synthetic polypeptide
APEAAGGPSVFLFPPKPKDTLMISRTPEVTCVVVDVSHEDPEVKFNWYVDGVEVHNAKTKPREEQYNSTYRVVSVLTVLHQDWLNGKEYKCKVSNKALPAPIEKTISKAKGQPREPQVYTLPPSRDELTKNQVSLWCLVKGFYPSDIAVLWESYGTEWASYKTTPPVLDSDGSFFLYSKLTVTKEEWQQGFVFSCSVMHEALHNHYTQKSLSLSPGK

SEQ ID NO: 217 - protein, 217 aa, Artificial Sequence
  Description of Artificial Sequence: Synthetic polypeptide
APEAAGGPSVFLFPPKPKDTLMISRTPEVTCVVVDVSHEDPEVKFNWYVDGVEVHNAKTKPREEQYNSTYRVVSVLTVLHQDWLNGKEYKCKVSNKALGAPIEKTISKAKGQPREPQVYTLPPSRDELTKNQVSLWCLVKGFYPSDIAVLWESYGTEWASYKTTPPVLDSDGSFFLYSKLTVTKEEWQQGFVFSCSVMHEALHNHYTQKSLSLSPGK

SEQ ID NO: 218 - protein, 217 aa, Artificial Sequence
  Description of Artificial Sequence: Synthetic polypeptide
APELLGGPSVFLFPPKPKDTLYITREPEVTCVVVDVSHEDPEVKFNWYVDGVEVHNAKTKPREEQYNSTYRVVSVLTVLHQDWLNGKEYKCKVSNKALPAPIEKTISKAKGQPREPQVYTLPPSRDELTKNQVSLWCLVKGFYPSDIAVLWESYGTEWASYKTTPPVLDSDGSFFLYSKLTVTKEEWQQGFVFSCSVMHEALHNHYTQKSLSLSPGK

SEQ ID NO: 219 - protein, 217 aa, Artificial Sequence
  Description of Artificial Sequence: Synthetic polypeptide
APEAAGGPSVFLFPPKPKDTLYITREPEVTCVVVDVSHEDPEVKFNWYVDGVEVHNAKTKPREEQYNSTYRVVSVLTVLHQDWLNGKEYKCKVSNKALPAPIEKTISKAKGQPREPQVYTLPPSRDELTKNQVSLWCLVKGFYPSDIAVLWESYGTEWASYKTTPPVLDSDGSFFLYSKLTVTKEEWQQGFVFSCSVMHEALHNHYTQKSLSLSPGK

SEQ ID NO: 220 - protein, 217 aa, Artificial Sequence
  Description of Artificial Sequence: Synthetic polypeptide
APEAAGGPSVFLFPPKPKDTLYITREPEVTCVVVDVSHEDPEVKFNWYVDGVEVHNAKTKPREEQYNSTYRVVSVLTVLHQDWLNGKEYKCKVSNKALGAPIEKTISKAKGQPREPQVYTLPPSRDELTKNQVSLWCLVKGFYPSDIAVLWESYGTEWASYKTTPPVLDSDGSFFLYSKLTVTKEEWQQGFVFSCSVMHEALHNHYTQKSLSLSPGK

SEQ ID NO: 221 - protein, 217 aa, Artificial Sequence
  Description of Artificial Sequence: Synthetic polypeptide
APELLGGPSVFLFPPKPKDTLMISRTPEVTCVVVDVSHEDPEVKFNWYVDGVEVHNAKTKPREEQYNSTYRVVSVLTVLHQDWLNGKEYKCKVSNKALPAPIEKTISKAKGQPREPQVYTLPPSRDELTKNQVSLSCAVKGFYPSDIAVLWESYGTEWASYKTTPPVLDSDGSFFLVSKLTVTKEEWQQGFVFSCSVMHEALHNHYTQKSLSLSPGK

SEQ ID NO: 222 - protein, 217 aa, Artificial Sequence
  Description of Artificial Sequence: Synthetic polypeptide
APEAAGGPSVFLFPPKPKDTLMISRTPEVTCVVVDVSHEDPEVKFNWYVDGVEVHNAKTKPREEQYNSTYRVVSVLTVLHQDWLNGKEYKCKVSNKALPAPIEKTISKAKGQPREPQVYTLPPSRDELTKNQVSLSCAVKGFYPSDIAVLWESYGTEWASYKTTPPVLDSDGSFFLVSKLTVTKEEWQQGFVFSCSVMHEALHNHYTQKSLSLSPGK

SEQ ID NO: 223 - protein, 217 aa, Artificial Sequence
  Description of Artificial Sequence: Synthetic polypeptide
APEAAGGPSVFLFPPKPKDTLMISRTPEVTCVVVDVSHEDPEVKFNWYVDGVEVHNAKTKPREEQYNSTYRVVSVLTVLHQDWLNGKEYKCKVSNKALGAPIEKTISKAKGQPREPQVYTLPPSRDELTKNQVSLSCAVKGFYPSDIAVLWESYGTEWASYKTTPPVLDSDGSFFLVSKLTVTKEEWQQGFVFSCSVMHEALHNHYTQKSLSLSPGK

SEQ ID NO: 224 - protein, 217 aa, Artificial Sequence
  Description of Artificial Sequence: Synthetic polypeptide
APELLGGPSVFLFPPKPKDTLYITREPEVTCVVVDVSHEDPEVKFNWYVDGVEVHNAKTKPREEQYNSTYRVVSVLTVLHQDWLNGKEYKCKVSNKALPAPIEKTISKAKGQPREPQVYTLPPSRDELTKNQVSLSCAVKGFYPSDIAVLWESYGTEWASYKTTPPVLDSDGSFFLVSKLTVTKEEWQQGFVFSCSVMHEALHNHYTQKSLSLSPGK

SEQ ID NO: 225 - protein, 217 aa, Artificial Sequence
  Description of Artificial Sequence: Synthetic polypeptide
APEAAGGPSVFLFPPKPKDTLYITREPEVTCVVVDVSHEDPEVKFNWYVDGVEVHNAKTKPREEQYNSTYRVVSVLTVLHQDWLNGKEYKCKVSNKALPAPIEKTISKAKGQPREPQVYTLPPSRDELTKNQVSLSCAVKGFYPSDIAVLWESYGTEWASYKTTPPVLDSDGSFFLVSKLTVTKEEWQQGFVFSCSVMHEALHNHYTQKSLSLSPGK

SEQ ID NO: 226 - protein, 217 aa, Artificial Sequence
  Description of Artificial Sequence: Synthetic polypeptide
APEAAGGPSVFLFPPKPKDTLYITREPEVTCVVVDVSHEDPEVKFNWYVDGVEVHNAKTKPREEQYNSTYRVVSVLTVLHQDWLNGKEYKCKVSNKALGAPIEKTISKAKGQPREPQVYTLPPSRDELTKNQVSLSCAVKGFYPSDIAVLWESYGTEWASYKTTPPVLDSDGSFFLVSKLTVTKEEWQQGFVFSCSVMHEALHNHYTQKSLSLSPGK

SEQ ID NO: 227 - protein, 217 aa, Artificial Sequence
  Description of Artificial Sequence: Synthetic polypeptide
APELLGGPSVFLFPPKPKDTLMISRTPEVTCVVVDVSHEDPEVKFNWYVDGVEVHNAKTKPREEQYNSTYRVVSVLTVLHQDWLNGKEYKCKVSNKALPAPIEKTISKAKGQPREPQVYTLPPSRDELTKNQVSLWCLVKGFYPSDIAVEWESYGTEWSNYKTTPPVLDSDGSFFLYSKLTVTKEEWQQGFVFSCSVMHEALHNHYTQKSLSLSPGK

SEQ ID NO: 228 - protein, 217 aa, Artificial Sequence
  Description of Artificial Sequence: Synthetic polypeptide
APEAAGGPSVFLFPPKPKDTLMISRTPEVTCVVVDVSHEDPEVKFNWYVDGVEVHNAKTKPREEQYNSTYRVVSVLTVLHQDWLNGKEYKCKVSNKALPAPIEKTISKAKGQPREPQVYTLPPSRDELTKNQVSLWCLVKGFYPSDIAVEWESYGTEWSNYKTTPPVLDSDGSFFLYSKLTVTKEEWQQGFVFSCSVMHEALHNHYTQKSLSLSPGK

SEQ ID NO: 229 - protein, 217 aa, Artificial Sequence
  Description of Artificial Sequence: Synthetic polypeptide
APEAAGGPSVFLFPPKPKDTLMISRTPEVTCVVVDVSHEDPEVKFNWYVDGVEVHNAKTKPREEQYNSTYRVVSVLTVLHQDWLNGKEYKCKVSNKALGAPIEKTISKAKGQPREPQVYTLPPSRDELTKNQVSLWCLVKGFYPSDIAVEWESYGTEWSNYKTTPPVLDSDGSFFLYSKLTVTKEEWQQGFVFSCSVMHEALHNHYTQKSLSLSPGK

SEQ ID NO: 230 - protein, 217 aa, Artificial Sequence
  Description of Artificial Sequence: Synthetic polypeptide
APELLGGPSVFLFPPKPKDTLYITREPEVTCVVVDVSHEDPEVKFNWYVDGVEVHNAKTKPREEQYNSTYRVVSVLTVLHQDWLNGKEYKCKVSNKALPAPIEKTISKAKGQPREPQVYTLPPSRDELTKNQVSLWCLVKGFYPSDIAVEWESYGTEWSNYKTTPPVLDSDGSFFLYSKLTVTKEEWQQGFVFSCSVMHEALHNHYTQKSLSLSPGK

SEQ ID NO: 231 - protein, 217 aa, Artificial Sequence
  Description of Artificial Sequence: Synthetic polypeptide
APEAAGGPSVFLFPPKPKDTLYITREPEVTCVVVDVSHEDPEVKFNWYVDGVEVHNAKTKPREEQYNSTYRVVSVLTVLHQDWLNGKEYKCKVSNKALPAPIEKTISKAKGQPREPQVYTLPPSRDELTKNQVSLWCLVKGFYPSDIAVEWESYGTEWSNYKTTPPVLDSDGSFFLYSKLTVTKEEWQQGFVFSCSVMHEALHNHYTQKSLSLSPGK

SEQ ID NO: 232 - protein, 217 aa, Artificial Sequence
  Description of Artificial Sequence: Synthetic polypeptide
APEAAGGPSVFLFPPKPKDTLYITREPEVTCVVVDVSHEDPEVKFNWYVDGVEVHNAKTKPREEQYNSTYRVVSVLTVLHQDWLNGKEYKCKVSNKALGAPIEKTISKAKGQPREPQVYTLPPSRDELTKNQVSLWCLVKGFYPSDIAVEWESYGTEWSNYKTTPPVLDSDGSFFLYSKLTVTKEEWQQGFVFSCSVMHEALHNHYTQKSLSLSPGK

SEQ ID NO: 233 - protein, 217 aa, Artificial Sequence
  Description of Artificial Sequence: Synthetic polypeptide
APELLGGPSVFLFPPKPKDTLMISRTPEVTCVVVDVSHEDPEVKFNWYVDGVEVHNAKTKPREEQYNSTYRVVSVLTVLHQDWLNGKEYKCKVSNKALPAPIEKTISKAKGQPREPQVYTLPPSRDELTKNQVSLSCAVKGFYPSDIAVEWESYGTEWSNYKTTPPVLDSDGSFFLVSKLTVTKEEWQQGFVFSCSVMHEALHNHYTQKSLSLSPGK

SEQ ID NO: 234 - protein, 217 aa, Artificial Sequence
  Description of Artificial Sequence: Synthetic polypeptide
APEAAGGPSVFLFPPKPKDTLMISRTPEVTCVVVDVSHEDPEVKFNWYVDGVEVHNAKTKPREEQYNSTYRVVSVLTVLHQDWLNGKEYKCKVSNKALPAPIEKTISKAKGQPREPQVYTLPPSRDELTKNQVSLSCAVKGFYPSDIAVEWESYGTEWSNYKTTPPVLDSDGSFFLVSKLTVTKEEWQQGFVFSCSVMHEALHNHYTQKSLSLSPGK

SEQ ID NO: 235 - protein, 217 aa, Artificial Sequence
  Description of Artificial Sequence: Synthetic polypeptide
APEAAGGPSVFLFPPKPKDTLMISRTPEVTCVVVDVSHEDPEVKFNWYVDGVEVHNAKTKPREEQYNSTYRVVSVLTVLHQDWLNGKEYKCKVSNKALGAPIEKTISKAKGQPREPQVYTLPPSRDELTKNQVSLSCAVKGFYPSDIAVEWESYGTEWSNYKTTPPVLDSDGSFFLVSKLTVTKEEWQQGFVFSCSVMHEALHNHYTQKSLSLSPGK

SEQ ID NO: 236 - protein, 217 aa, Artificial Sequence
  Description of Artificial Sequence: Synthetic polypeptide
APELLGGPSVFLFPPKPKDTLYITREPEVTCVVVDVSHEDPEVKFNWYVDGVEVHNAKTKPREEQYNSTYRVVSVLTVLHQDWLNGKEYKCKVSNKALPAPIEKTISKAKGQPREPQVYTLPPSRDELTKNQVSLSCAVKGFYPSDIAVEWESYGTEWSNYKTTPPVLDSDGSFFLVSKLTVTKEEWQQGFVFSCSVMHEALHNHYTQKSLSLSPGK

SEQ ID NO: 237 - protein, 217 aa, Artificial Sequence
  Description of Artificial Sequence: Synthetic polypeptide
APEAAGGPSVFLFPPKPKDTLYITREPEVTCVVVDVSHEDPEVKFNWYVDGVEVHNAKTKPREEQYNSTYRVVSVLTVLHQDWLNGKEYKCKVSNKALPAPIEKTISKAKGQPREPQVYTLPPSRDELTKNQVSLSCAVKGFYPSDIAVEWESYGTEWSNYKTTPPVLDSDGSFFLVSKLTVTKEEWQQGFVFSCSVMHEALHNHYTQKSLSLSPGK

SEQ ID NO: 238 - protein, 217 aa, Artificial Sequence
  Description of Artificial Sequence: Synthetic polypeptide
APEAAGGPSVFLFPPKPKDTLYITREPEVTCVVVDVSHEDPEVKFNWYVDGVEVHNAKTKPREEQYNSTYRVVSVLTVLHQDWLNGKEYKCKVSNKALGAPIEKTISKAKGQPREPQVYTLPPSRDELTKNQVSLSCAVKGFYPSDIAVEWESYGTEWSNYKTTPPVLDSDGSFFLVSKLTVTKEEWQQGFVFSCSVMHEALHNHYTQKSLSLSPGK

SEQ ID NO: 239 - protein, 217 aa, Artificial Sequence
  Description of Artificial Sequence: Synthetic polypeptide
APELLGGPSVFLFPPKPKDTLMISRTPEVTCVVVDVSHEDPEVKFNWYVDGVEVHNAKTKPREEQYNSTYRVVSVLTVLHQDWLNGKEYKCKVSNKALPAPIEKTISKAKGQPREPQVYTLPPSRDELTKNQVSLTCLVKGFYPSDIAVEWESWGFVWSTYKTTPPVLDSDGSFFLYSKLTVPKSNWQQGFVFSCSVMHEALHNHYTQKSLSLSPGK

SEQ ID NO: 240 - protein, 217 aa, Artificial Sequence
  Description of Artificial Sequence: Synthetic polypeptide
APELLGGPSVFLFPPKPKDTLMISRTPEVTCVVVDVSHEDPEVKFNWYVDGVEVHNAKTKPREEQYNSTYRVVSVLTVLHQDWLNGKEYKCKVSNKALPAPIEKTISKAKGQPREPQVYTLPPSRDELTKNQVSLTCLVKGFYPSDIAVEWESWGHVWSTYKTTPPVLDSDGSFFLYSKLTVPKSNWQQGYVFSCSVMHEALHNHYTQKSLSLSPGK

SEQ ID NO: 241 - protein, 217 aa, Artificial Sequence
  Description of Artificial Sequence: Synthetic polypeptide
APELLGGPSVFLFPPKPKDTLMISRTPEVTCVVVDVSHEDPEVKFNWYVDGVEVHNAKTKPREEQYNSTYRVVSVLTVLHQDWLNGKEYKCKVSNKALPAPIEKTISKAKGQPREPQVYTLPPSRDELTKNQVSLTCLVKGFYPSDIAVEWESLGHVWVEQKTTPPVLDSDGSFFLYSKLTVPKSTWQQGWVFSCSVMHEALHNHYTQKSLSLSPGK

SEQ ID NO: 242 - protein, 217 aa, Artificial Sequence
  Description of Artificial Sequence: Synthetic polypeptide
APELLGGPSVFLFPPKPKDTLMISRTPEVTCVVVDVSHEDPEVKFNWYVDGVEVHNAKTKPREEQYNSTYRVVSVLTVLHQDWLNGKEYKCKVSNKALPAPIEKTISKAKGQPREPQVYTLPPSRDELTKNQVSLTCLVKGFYPSDIAVEWESLGHVWVGVKTTPPVLDSDGSFFLYSKLTVPKSTWQQGWVFSCSVMHEALHNHYTQKSLSLSPGK

SEQ ID NO: 243 - protein, 217 aa, Artificial Sequence
  Description of Artificial Sequence: Synthetic polypeptide
APELLGGPSVFLFPPKPKDTLMISRTPEVTCVVVDVSHEDPEVKFNWYVDGVEVHNAKTKPREEQYNSTYRVVSVLTVLHQDWLNGKEYKCKVSNKALPAPIEKTISKAKGQPREPQVYTLPPSRDELTKNQVSLTCLVKGFYPSDIAVEWESLGHVWVHTKTTPPVLDSDGSFFLYSKLTVPKSTWQQGWVFSCSVMHEALHNHYTQKSLSLSPGK

SEQ ID NO: 244 - protein, 217 aa, Artificial Sequence
  Description of Artificial Sequence: Synthetic polypeptide
APELLGGPSVFLFPPKPKDTLMISRTPEVTCVVVDVSHEDPEVKFNWYVDGVEVHNAKTKPREEQYNSTYRVVSVLTVLHQDWLNGKEYKCKVSNKALPAPIEKTISKAKGQPREPQVYTLPPSRDELTKNQVSLTCLVKGFYPSDIAVEWESWGTVWGTYKTTPPVLDSDGSFFLYSKLTVPKSNWQQGYVFSCSVMHEALHNHYTQKSLSLSPGK

SEQ ID NO: 245 - protein, 217 aa, Artificial Sequence
  Description of Artificial Sequence: Synthetic polypeptide
APELLGGPSVFLFPPKPKDTLMISRTPEVTCVVVDVSHEDPEVKFNWYVDGVEVHNAKTKPREEQYNSTYRVVSVLTVLHQDWLNGKEYKCKVSNKALPAPIEKTISKAKGQPREPQVYTLPPSRDELTKNQVSLTCLVKGFYPSDIAVEWESLGHVWVGTKTTPPVLDSDGSFFLYSKLTVPKSTWQQGWVFSCSVMHEALHNHYTQKSLSLSPGK

SEQ ID NO: 246 - protein, 217 aa, Artificial Sequence
  Description of Artificial Sequence: Synthetic polypeptide
APELLGGPSVFLFPPKPKDTLMISRTPEVTCVVVDVSHEDPEVKFNWYVDGVEVHNAKTKPREEQYNSTYRVVSVLTVLHQDWLNGKEYKCKVSNKALPAPIEKTISKAKGQPREPQVYTLPPSRDELTKNQVSLTCLVKGFYPSDIAVEWESFGTEWSSYKTTPPVLDSDGSFFLYSKLTVSKEEWQQGFVFSCSVMHEALHNHYTQKSLSLSPGK

SEQ ID NO: 247 - protein, 217 aa, Artificial Sequence
  Description of Artificial Sequence: Synthetic polypeptide
APELLGGPSVFLFPPKPKDTLMISRTPEVTCVVVDVSHEDPEVKFNWYVDGVEVHNAKTKPREEQYNSTYRVVSVLTVLHQDWLNGKEYKCKVSNKALPAPIEKTISKAKGQPREPQVYTLPPSRDELTKNQVSLTCLVKGFYPSDIAVEWESYGTEWANYKTTPPVLDSDGSFFLYSKLTVSKSEWQQGFVFSCSVMHEALHNHYTQKSLSLSPGK

SEQ ID NO: 248 - protein, 217 aa, Artificial Sequence
  Description of Artificial Sequence: Synthetic polypeptide
APELLGGPSVFLFPPKPKDTLMISRTPEVTCVVVDVSHEDPEVKFNWYVDGVEVHNAKTKPREEQYNSTYRVVSVLTVLHQDWLNGKEYKCKVSNKALPAPIEKTISKAKGQPREPQVYTLPPSRDELTKNQVSLTCLVKGFYPSDIAVEWESFGTEWSNYKTTPPVLDSDGSFFLYSKLTVSKEEWQQGFVFSCSVMHEALHNHYTQKSLSLSPGK

SEQ ID NO: 249 - protein, 217 aa, Artificial Sequence
  Description of Artificial Sequence: Synthetic polypeptide
APELLGGPSVFLFPPKPKDTLMISRTPEVTCVVVDVSHEDPEVKFNWYVDGVEVHNAKTKPREEQYNSTYRVVSVLTVLHQDWLNGKEYKCKVSNKALPAPIEKTISKAKGQPREPQVYTLPPSRDELTKNQVSLTCLVKGFYPSDIAVEWESYGTEWSSYKTTPPVLDSDGSFFLYSKLTVSKSEWQQGFVFSCSVMHEALHNHYTQKSLSLSPGK

SEQ ID NO: 250 - protein, 217 aa, Artificial Sequence
  Description of Artificial Sequence: Synthetic polypeptide
APELLGGPSVFLFPPKPKDTLMISRTPEVTCVVVDVSHEDPEVKFNWYVDGVEVHNAKTKPREEQYNSTYRVVSVLTVLHQDWLNGKEYKCKVSNKALPAPIEKTISKAKGQPREPQVYTLPPSRDELTKNQVSLTCLVKGFYPSDIAVEWESYGTEWVNYKTTPPVLDSDGSFFLYSKLTVSKEEWQQGFVFSCSVMHEALHNHYTQKSLSLSPGK

SEQ ID NO: 251 - protein, 217 aa, Artificial Sequence; identical to SEQ ID NO: 14
  Description of Artificial Sequence: Synthetic polypeptide

SEQ ID NO: 252 - protein, 217 aa, Artificial Sequence
  Description of Artificial Sequence: Synthetic polypeptide
APELLGGPSVFLFPPKPKDTLMISRTPEVTCVVVDVSHEDPEVKFNWYVDGVEVHNAKTKPREEQYNSTYRVVSVLTVLHQDWLNGKEYKCKVSNKALPAPIEKTISKAKGQPREPQVYTLPPSRDELTKNQVSLTCLVKGFYPSDIAVEWESFGTEWVNYKTTPPVLDSDGSFFLYSKLTVSKEEWQQGFVFSCSVMHEALHNHYTQKSLSLSPGK

SEQ ID NO: 253 - protein, 217 aa, Artificial Sequence
  Description of Artificial Sequence: Synthetic polypeptide
APELLGGPSVFLFPPKPKDTLMISRTPEVTCVVVDVSHEDPEVKFNWYVDGVEVHNAKTKPREEQYNSTYRVVSVLTVLHQDWLNGKEYKCKVSNKALPAPIEKTISKAKGQPREPQVYTLPPSRDELTKNQVSLWCLVKGFYPSDIAVWWESYGTEWSSYKTTPPVLDSDGSFFLYSKLTVTKEEWQQGFVFSCSVMHEALHNHYTQKSLSLSPGK

SEQ ID NO: 254 - protein, 217 aa, Artificial Sequence
  Description of Artificial Sequence: Synthetic polypeptide
APEAAGGPSVFLFPPKPKDTLMISRTPEVTCVVVDVSHEDPEVKFNWYVDGVEVHNAKTKPREEQYNSTYRVVSVLTVLHQDWLNGKEYKCKVSNKALPAPIEKTISKAKGQPREPQVYTLPPSRDELTKNQVSLWCLVKGFYPSDIAVWWESYGTEWSSYKTTPPVLDSDGSFFLYSKLTVTKEEWQQGFVFSCSVMHEALHNHYTQKSLSLSPGK

SEQ ID NO: 255 - protein, 217 aa, Artificial Sequence
  Description of Artificial Sequence: Synthetic polypeptide
APEAAGGPSVFLFPPKPKDTLMISRTPEVTCVVVDVSHEDPEVKFNWYVDGVEVHNAKTKPREEQYNSTYRVVSVLTVLHQDWLNGKEYKCKVSNKALGAPIEKTISKAKGQPREPQVYTLPPSRDELTKNQVSLWCLVKGFYPSDIAVWWESYGTEWSSYKTTPPVLDSDGSFFLYSKLTVTKEEWQQGFVFSCSVMHEALHNHYTQKSLSLSPGK

SEQ ID NO: 256 - protein, 217 aa, Artificial Sequence
  Description of Artificial Sequence: Synthetic polypeptide
APELLGGPSVFLFPPKPKDTLYITREPEVTCVVVDVSHEDPEVKFNWYVDGVEVHNAKTKPREEQYNSTYRVVSVLTVLHQDWLNGKEYKCKVSNKALPAPIEKTISKAKGQPREPQVYTLPPSRDELTKNQVSLWCLVKGFYPSDIAVWWESYGTEWSSYKTTPPVLDSDGSFFLYSKLTVTKEEWQQGFVFSCSVMHEALHNHYTQKSLSLSPGK

SEQ ID NO: 257 - protein, 217 aa, Artificial Sequence
  Description of Artificial Sequence: Synthetic polypeptide
APEAAGGPSVFLFPPKPKDTLYITREPEVTCVVVDVSHEDPEVKFNWYVDGVEVHNAKTKPREEQYNSTYRVVSVLTVLHQDWLNGKEYKCKVSNKALPAPIEKTISKAKGQPREPQVYTLPPSRDELTKNQVSLWCLVKGFYPSDIAVWWESYGTEWSSYKTTPPVLDSDGSFFLYSKLTVTKEEWQQGFVFSCSVMHEALHNHYTQKSLSLSPGK

SEQ ID NO: 258 - protein, 217 aa, Artificial Sequence
  Description of Artificial Sequence: Synthetic polypeptide
APEAAGGPSVFLFPPKPKDTLYITREPEVTCVVVDVSHEDPEVKFNWYVDGVEVHNAKTKPREEQYNSTYRVVSVLTVLHQDWLNGKEYKCKVSNKALGAPIEKTISKAKGQPREPQVYTLPPSRDELTKNQVSLWCLVKGFYPSDIAVWWESYGTEWSSYKTTPPVLDSDGSFFLYSKLTVTKEEWQQGFVFSCSVMHEALHNHYTQKSLSLSPGK

SEQ ID NO: 259 - protein, 217 aa, Artificial Sequence
  Description of Artificial Sequence: Synthetic polypeptide
APELLGGPSVFLFPPKPKDTLMISRTPEVTCVVVDVSHEDPEVKFNWYVDGVEVHNAKTKPREEQYNSTYRVVSVLTVLHQDWLNGKEYKCKVSNKALPAPIEKTISKAKGQPREPQVYTLPPSRDELTKNQVSLSCAVKGFYPSDIAVWWESYGTEWSSYKTTPPVLDSDGSFFLVSKLTVTKEEWQQGFVFSCSVMHEALHNHYTQKSLSLSPGK

SEQ ID NO: 260 - protein, 217 aa, Artificial Sequence
  Description of Artificial Sequence: Synthetic polypeptide
APEAAGGPSVFLFPPKPKDTLMISRTPEVTCVVVDVSHEDPEVKFNWYVDGVEVHNAKTKPREEQYNSTYRVVSVLTVLHQDWLNGKEYKCKVSNKALPAPIEKTISKAKGQPREPQVYTLPPSRDELTKNQVSLSCAVKGFYPSDIAVWWESYGTEWSSYKTTPPVLDSDGSFFLVSKLTVTKEEWQQGFVFSCSVMHEALHNHYTQKSLSLSPGK

SEQ ID NO: 261 - protein, 217 aa, Artificial Sequence
  Description of Artificial Sequence: Synthetic polypeptide
APEAAGGPSVFLFPPKPKDTLMISRTPEVTCVVVDVSHEDPEVKFNWYVDGVEVHNAKTKPREEQYNSTYRVVSVLTVLHQDWLNGKEYKCKVSNKALGAPIEKTISKAKGQPREPQVYTLPPSRDELTKNQVSLSCAVKGFYPSDIAVWWESYGTEWSSYKTTPPVLDSDGSFFLVSKLTVTKEEWQQGFVFSCSVMHEALHNHYTQKSLSLSPGK

SEQ ID NO: 262 - protein, 217 aa, Artificial Sequence
  Description of Artificial Sequence: Synthetic polypeptide
APELLGGPSVFLFPPKPKDTLYITREPEVTCVVVDVSHEDPEVKFNWYVDGVEVHNAKTKPREEQYNSTYRVVSVLTVLHQDWLNGKEYKCKVSNKALPAPIEKTISKAKGQPREPQVYTLPPSRDELTKNQVSLSCAVKGFYPSDIAVWWESYGTEWSSYKTTPPVLDSDGSFFLVSKLTVTKEEWQQGFVFSCSVMHEALHNHYTQKSLSLSPGK

SEQ ID NO: 263 - protein, 217 aa, Artificial Sequence
  Description of Artificial Sequence: Synthetic polypeptide
APEAAGGPSVFLFPPKPKDTLYITREPEVTCVVVDVSHEDPEVKFNWYVDGVEVHNAKTKPREEQYNSTYRVVSVLTVLHQDWLNGKEYKCKVSNKALPAPIEKTISKAKGQPREPQVYTLPPSRDELTKNQVSLSCAVKGFYPSDIAVWWESYGTEWSSYKTTPPVLDSDGSFFLVSKLTVTKEEWQQGFVFSCSVMHEALHNHYTQKSLSLSPGK

SEQ ID NO: 264 - protein, 217 aa, Artificial Sequence
  Description of Artificial Sequence: Synthetic polypeptide
APEAAGGPSVFLFPPKPKDTLYITREPEVTCVVVDVSHEDPEVKFNWYVDGVEVHNAKTKPREEQYNSTYRVVSVLTVLHQDWLNGKEYKCKVSNKALGAPIEKTISKAKGQPREPQVYTLPPSRDELTKNQVSLSCAVKGFYPSDIAVWWESYGTEWSSYKTTPPVLDSDGSFFLVSKLTVTKEEWQQGFVFSCSVMHEALHNHYTQKSLSLSPGK

SEQ ID NO: 265 - protein, 217 aa, Artificial Sequence
  Description of Artificial Sequence: Synthetic polypeptide
APELLGGPSVFLFPPKPKDTLMISRTPEVTCVVVDVSHEDPEVKFNWYVDGVEVHNAKTKPREEQYNSTYRVVSVLTVLHQDWLNGKEYKCKVSNKALPAPIEKTISKAKGQPREPQVYTLPPSRDELTKNQVSLWCLVKGFYPSDIAVEWESFGTEWSSYKTTPPVLDSDGSFFLYSKLTVSKEEWQQGFVFSCSVMHEALHNHYTQKSLSLSPGK

SEQ ID NO: 266 - protein, 217 aa, Artificial Sequence
  Description of Artificial Sequence: Synthetic polypeptide
APEAAGGPSVFLFPPKPKDTLMISRTPEVTCVVVDVSHEDPEVKFNWYVDGVEVHNAKTKPREEQYNSTYRVVSVLTVLHQDWLNGKEYKCKVSNKALPAPIEKTISKAKGQPREPQVYTLPPSRDELTKNQVSLWCLVKGFYPSDIAVEWESFGTEWSSYKTTPPVLDSDGSFFLYSKLTVSKEEWQQGFVFSCSVMHEALHNHYTQKSLSLSPGK

SEQ ID NO: 267 - protein, 217 aa, Artificial Sequence
  Description of Artificial Sequence: Synthetic polypeptide
APEAAGGPSVFLFPPKPKDTLMISRTPEVTCVVVDVSHEDPEVKFNWYVDGVEVHNAKTKPREEQYNSTYRVVSVLTVLHQDWLNGKEYKCKVSNKALGAPIEKTISKAKGQPREPQVYTLPPSRDELTKNQVSLWCLVKGFYPSDIAVEWESFGTEWSSYKTTPPVLDSDGSFFLYSKLTVSKEEWQQGFVFSCSVMHEALHNHYTQKSLSLSPGK

SEQ ID NO: 268 - protein, 217 aa, Artificial Sequence
  Description of Artificial Sequence: Synthetic polypeptide
APELLGGPSVFLFPPKPKDTLYITREPEVTCVVVDVSHEDPEVKFNWYVDGVEVHNAKTKPREEQYNSTYRVVSVLTVLHQDWLNGKEYKCKVSNKALPAPIEKTISKAKGQPREPQVYTLPPSRDELTKNQVSLWCLVKGFYPSDIAVEWESFGTEWSSYKTTPPVLDSDGSFFLYSKLTVSKEEWQQGFVFSCSVMHEALHNHYTQKSLSLSPGK

SEQ ID NO: 269 - protein, 217 aa, Artificial Sequence
  Description of Artificial Sequence: Synthetic polypeptide
APEAAGGPSVFLFPPKPKDTLYITREPEVTCVVVDVSHEDPEVKFNWYVDGVEVHNAKTKPREEQYNSTYRVVSVLTVLHQDWLNGKEYKCKVSNKALPAPIEKTISKAKGQPREPQVYTLPPSRDELTKNQVSLWCLVKGFYPSDIAVEWESFGTEWSSYKTTPPVLDSDGSFFLYSKLTVSKEEWQQGFVFSCSVMHEALHNHYTQKSLSLSPGK

SEQ ID NO: 270 - protein, 217 aa, Artificial Sequence
  Description of Artificial Sequence: Synthetic polypeptide
APEAAGGPSVFLFPPKPKDTLYITREPEVTCVVVDVSHEDPEVKFNWYVDGVEVHNAKTKPREEQYNSTYRVVSVLTVLHQDWLNGKEYKCKVSNKALGAPIEKTISKAKGQPREPQVYTLPPSRDELTKNQVSLWCLVKGFYPSDIAVEWESFGTEWSSYKTTPPVLDSDGSFFLYSKLTVSKEEWQQGFVFSCSVMHEALHNHYTQKSLSLSPGK

SEQ ID NO: 271 - protein, 217 aa, Artificial Sequence
  Description of Artificial Sequence: Synthetic polypeptide
APELLGGPSVFLFPPKPKDTLMISRTPEVTCVVVDVSHEDPEVKFNWYVDGVEVHNAKTKPREEQYNSTYRVVSVLTVLHQDWLNGKEYKCKVSNKALPAPIEKTISKAKGQPREPQVYTLPPSRDELTKNQVSLSCAVKGFYPSDIAVEWESFGTEWSSYKTTPPVLDSDGSFFLVSKLTVSKEEWQQGFVFSCSVMHEALHNHYTQKSLSLSPGK

SEQ ID NO: 272 - protein, 217 aa, Artificial Sequence
  Description of Artificial Sequence: Synthetic polypeptide
APEAAGGPSVFLFPPKPKDTLMISRTPEVTCVVVDVSHEDPEVKFNWYVDGVEVHNAKTKPREEQYNSTYRVVSVLTVLHQDWLNGKEYKCKVSNKALPAPIEKTISKAKGQPREPQVYTLPPSRDELTKNQVSLSCAVKGFYPSDIAVEWESFGTEWSSYKTTPPVLDSDGSFFLVSKLTVSKEEWQQGFVFSCSVMHEALHNHYTQKSLSLSPGK

SEQ ID NO: 273 - protein, 217 aa, Artificial Sequence
  Description of Artificial Sequence: Synthetic polypeptide
APEAAGGPSVFLFPPKPKDTLMISRTPEVTCVVVDVSHEDPEVKFNWYVDGVEVHNAKTKPREEQYNSTYRVVSVLTVLHQDWLNGKEYKCKVSNKALGAPIEKTISKAKGQPREPQVYTLPPSRDELTKNQVSLSCAVKGFYPSDIAVEWESFGTEWSSYKTTPPVLDSDGSFFLVSKLTVSKEEWQQGFVFSCSVMHEALHNHYTQKSLSLSPGK

SEQ ID NO: 274 - protein, 217 aa, Artificial Sequence
  Description of Artificial Sequence: Synthetic polypeptide
APELLGGPSVFLFPPKPKDTLYITREPEVTCVVVDVSHEDPEVKFNWYVDGVEVHNAKTKPREEQYNSTYRVVSVLTVLHQDWLNGKEYKCKVSNKALPAPIEKTISKAKGQPREPQVYTLPPSRDELTKNQVSLSCAVKGFYPSDIAVEWESFGTEWSSYKTTPPVLDSDGSFFLVSKLTVSKEEWQQGFVFSCSVMHEALHNHYTQKSLSLSPGK

SEQ ID NO: 275 - protein, 217 aa, Artificial Sequence
  Description of Artificial Sequence: Synthetic polypeptide
APEAAGGPSVFLFPPKPKDTLYITREPEVTCVVVDVSHEDPEVKFNWYVDGVEVHNAKTKPREEQYNSTYRVVSVLTVLHQDWLNGKEYKCKVSNKALPAPIEKTISKAKGQPREPQVYTLPPSRDELTKNQVSLSCAVKGFYPSDIAVEWESFGTEWSSYKTTPPVLDSDGSFFLVSKLTVSKEEWQQGFVFSCSVMHEALHNHYTQKSLSLSPGK

SEQ ID NO: 276 - protein, 217 aa, Artificial Sequence
  Description of Artificial Sequence: Synthetic polypeptide
APEAAGGPSVFLFPPKPKDTLYITREPEVTCVVVDVSHEDPEVKFNWYVDGVEVHNAKTKPREEQYNSTYRVVSVLTVLHQDWLNGKEYKCKVSNKALGAPIEKTISKAKGQPREPQVYTLPPSRDELTKNQVSLSCAVKGFYPSDIAVEWESFGTEWSSYKTTPPVLDSDGSFFLVSKLTVSKEEWQQGFVFSCSVMHEALHNHYTQKSLSLSPGK

SEQ ID NO: 277 - protein, 217 aa, Artificial Sequence
  Description of Artificial Sequence: Synthetic polypeptide
APELLGGPSVFLFPPKPKDTLMISRTPEVTCVVVDVSHEDPEVKFNWYVDGVEVHNAKTKPREEQYNSTYRVVSVLTVLHQDWLNGKEYKCKVSNKALPAPIEKTISKAKGQPREPQVYTLPPSRDELTKNQVSLWCLVKGFYPSDIAVEWESYGTEWANYKTTPPVLDSDGSFFLYSKLTVSKSEWQQGFVFSCSVMHEALHNHYTQKSLSLSPGK

SEQ ID NO: 278 - protein, 217 aa, Artificial Sequence
  Description of Artificial Sequence: Synthetic polypeptide
APEAAGGPSVFLFPPKPKDTLMISRTPEVTCVVVDVSHEDPEVKFNWYVDGVEVHNAKTKPREEQYNSTYRVVSVLTVLHQDWLNGKEYKCKVSNKALPAPIEKTISKAKGQPREPQVYTLPPSRDELTKNQVSLWCLVKGFYPSDIAVEWESYGTEWANYKTTPPVLDSDGSFFLYSKLTVSKSEWQQGFVFSCSVMHEALHNHYTQKSLSLSPGK

SEQ ID NO: 279 - protein, 217 aa, Artificial Sequence
  Description of Artificial Sequence: Synthetic polypeptide
APEAAGGPSVFLFPPKPKDTLMISRTPEVTCVVVDVSHEDPEVKFNWYVDGVEVHNAKTKPREEQYNSTYRVVSVLTVLHQDWLNGKEYKCKVSNKALGAPIEKTISKAKGQPREPQVYTLPPSRDELTKNQVSLWCLVKGFYPSDIAVEWESYGTEWANYKTTPPVLDSDGSFFLYSKLTVSKSEWQQGFVFSCSVMHEALHNHYTQKSLSLSPGK

SEQ ID NO: 280 - protein, 217 aa, Artificial Sequence
  Description of Artificial Sequence: Synthetic polypeptide
APELLGGPSVFLFPPKPKDTLYITREPEVTCVVVDVSHEDPEVKFNWYVDGVEVHNAKTKPREEQYNSTYRVVSVLTVLHQDWLNGKEYKCKVSNKALPAPIEKTISKAKGQPREPQVYTLPPSRDELTKNQVSLWCLVKGFYPSDIAVEWESYGTEWANYKTTPPVLDSDGSFFLYSKLTVSKSEWQQGFVFSCSVMHEALHNHYTQKSLSLSPGK

SEQ ID NO: 281 - protein, 217 aa, Artificial Sequence
  Description of Artificial Sequence: Synthetic polypeptide
APEAAGGPSVFLFPPKPKDTLYITREPEVTCVVVDVSHEDPEVKFNWYVDGVEVHNAKTKPREEQYNSTYRVVSVLTVLHQDWLNGKEYKCKVSNKALPAPIEKTISKAKGQPREPQVYTLPPSRDELTKNQVSLWCLVKGFYPSDIAVEWESYGTEWANYKTTPPVLDSDGSFFLYSKLTVSKSEWQQGFVFSCSVMHEALHNHYTQKSLSLSPGK

SEQ ID NO: 282 - protein, 217 aa, Artificial Sequence
  Description of Artificial Sequence: Synthetic polypeptide
APEAAGGPSVFLFPPKPKDTLYITREPEVTCVVVDVSHEDPEVKFNWYVDGVEVHNAKTKPREEQYNSTYRVVSVLTVLHQDWLNGKEYKCKVSNKALGAPIEKTISKAKGQPREPQVYTLPPSRDELTKNQVSLWCLVKGFYPSDIAVEWESYGTEWANYKTTPPVLDSDGSFFLYSKLTVSKSEWQQGFVFSCSVMHEALHNHYTQKSLSLSPGK

SEQ ID NO: 283 - protein, 217 aa, Artificial Sequence
  Description of Artificial Sequence: Synthetic polypeptide
APELLGGPSVFLFPPKPKDTLMISRTPEVTCVVVDVSHEDPEVKFNWYVDGVEVHNAKTKPREEQYNSTYRVVSVLTVLHQDWLNGKEYKCKVSNKALPAPIEKTISKAKGQPREPQVYTLPPSRDELTKNQVSLSCAVKGFYPSDIAVEWESYGTEWANYKTTPPVLDSDGSFFLVSKLTVSKSEWQQGFVFSCSVMHEALHNHYTQKSLSLSPGK

SEQ ID NO: 284 - protein, 217 aa, Artificial Sequence
  Description of Artificial Sequence: Synthetic polypeptide
APEAAGGPSVFLFPPKPKDTLMISRTPEVTCVVVDVSHEDPEVKFNWYVDGVEVHNAKTKPREEQYNSTYRVVSVLTVLHQDWLNGKEYKCKVSNKALPAPIEKTISKAKGQPREPQVYTLPPSRDELTKNQVSLSCAVKGFYPSDIAVEWESYGTEWANYKTTPPVLDSDGSFFLVSKLTVSKSEWQQGFVFSCSVMHEALHNHYTQKSLSLSPGK

SEQ ID NO: 285 - protein, 217 aa, Artificial Sequence
  Description of Artificial Sequence: Synthetic polypeptide
APEAAGGPSVFLFPPKPKDTLMISRTPEVTCVVVDVSHEDPEVKFNWYVDGVEVHNAKTKPREEQYNSTYRVVSVLTVLHQDWLNGKEYKCKVSNKALGAPIEKTISKAKGQPREPQVYTLPPSRDELTKNQVSLSCAVKGFYPSDIAVEWESYGTEWANYKTTPPVLDSDGSFFLVSKLTVSKSEWQQGFVFSCSVMHEALHNHYTQKSLSLSPGK

SEQ ID NO: 286 - protein, 217 aa, Artificial Sequence
  Description of Artificial Sequence: Synthetic polypeptide
APELLGGPSVFLFPPKPKDTLYITREPEVTCVVVDVSHEDPEVKFNWYVDGVEVHNAKTKPREEQYNSTYRVVSVLTVLHQDWLNGKEYKCKVSNKALPAPIEKTISKAKGQPREPQVYTLPPSRDELTKNQVSLSCAVKGFYPSDIAVEWESYGTEWANYKTTPPVLDSDGSFFLVSKLTVSKSEWQQGFVFSCSVMHEALHNHYTQKSLSLSPGK

SEQ ID NO: 287 - protein, 217 aa, Artificial Sequence
  Description of Artificial Sequence: Synthetic polypeptide
APEAAGGPSVFLFPPKPKDTLYITREPEVTCVVVDVSHEDPEVKFNWYVDGVEVHNAKTKPREEQYNSTYRVVSVLTVLHQDWLNGKEYKCKVSNKALPAPIEKTISKAKGQPREPQVYTLPPSRDELTKNQVSLSCAVKGFYPSDIAVEWESYGTEWANYKTTPPVLDSDGSFFLVSKLTVSKSEWQQGFVFSCSVMHEALHNHYTQKSLSLSPGK

SEQ ID NO: 288 - protein, 217 aa, Artificial Sequence
  Description of Artificial Sequence: Synthetic polypeptide
APEAAGGPSVFLFPPKPKDTLYITREPEVTCVVVDVSHEDPEVKFNWYVDGVEVHNAKTKPREEQYNSTYRVVSVLTVLHQDWLNGKEYKCKVSNKALGAPIEKTISKAKGQPREPQVYTLPPSRDELTKNQVSLSCAVKGFYPSDIAVEWESYGTEWANYKTTPPVLDSDGSFFLVSKLTVSKSEWQQGFVFSCSVMHEALHNHYTQKSLSLSPGK

SEQ ID NO: 289 - protein, 217 aa, Artificial Sequence
  Description of Artificial Sequence: Synthetic polypeptide
APELLGGPSVFLFPPKPKDTLMISRTPEVTCVVVDVSHEDPEVKFNWYVDGVEVHNAKTKPREEQYNSTYRVVSVLTVLHQDWLNGKEYKCKVSNKALPAPIEKTISKAKGQPREPQVYTLPPSRDELTKNQVSLWCLVKGFYPSDIAVEWESFGTEWSNYKTTPPVLDSDGSFFLYSKLTVSKEEWQQGFVFSCSVMHEALHNHYTQKSLSLSPGK

SEQ ID NO: 290 - protein, 217 aa, Artificial Sequence
  Description of Artificial Sequence: Synthetic polypeptide
APEAAGGPSVFLFPPKPKDTLMISRTPEVTCVVVDVSHEDPEVKFNWYVDGVEVHNAKTKPREEQYNSTYRVVSVLTVLHQDWLNGKEYKCKVSNKALPAPIEKTISKAKGQPREPQVYTLPPSRDELTKNQVSLWCLVKGFYPSDIAVEWESFGTEWSNYKTTPPVLDSDGSFFLYSKLTVSKEEWQQGFVFSCSVMHEALHNHYTQKSLSLSPGK

SEQ ID NO: 291 - protein, 217 aa, Artificial Sequence
  Description of Artificial Sequence: Synthetic polypeptide
APEAAGGPSVFLFPPKPKDTLMISRTPEVTCVVVDVSHEDPEVKFNWYVDGVEVHNAKTKPREEQYNSTYRVVSVLTVLHQDWLNGKEYKCKVSNKALGAPIEKTISKAKGQPREPQVYTLPPSRDELTKNQVSLWCLVKGFYPSDIAVEWESFGTEWSNYKTTPPVLDSDGSFFLYSKLTVSKEEWQQGFVFSCSVMHEALHNHYTQKSLSLSPGK

SEQ ID NO: 292 - protein, 217 aa, Artificial Sequence
  Description of Artificial Sequence: Synthetic polypeptide
APELLGGPSVFLFPPKPKDTLYITREPEVTCVVVDVSHEDPEVKFNWYVDGVEVHNAKTKPREEQYNSTYRVVSVLTVLHQDWLNGKEYKCKVSNKALPAPIEKTISKAKGQPREPQVYTLPPSRDELTKNQVSLWCLVKGFYPSDIAVEWESFGTEWSNYKTTPPVLDSDGSFFLYSKLTVSKEEWQQGFVFSCSVMHEALHNHYTQKSLSLSPGK

SEQ ID NO: 293 - protein, 217 aa, Artificial Sequence
  Description of Artificial Sequence: Synthetic polypeptide
APEAAGGPSVFLFPPKPKDTLYITREPEVTCVVVDVSHEDPEVKFNWYVDGVEVHNAKTKPREEQYNSTYRVVSVLTVLHQDWLNGKEYKCKVSNKALPAPIEKTISKAKGQPREPQVYTLPPSRDELTKNQVSLWCLVKGFYPSDIAVEWESFGTEWSNYKTTPPVLDSDGSFFLYSKLTVSKEEWQQGFVFSCSVMHEALHNHYTQKSLSLSPGK

SEQ ID NO: 294 - protein, 217 aa, Artificial Sequence
  Description of Artificial Sequence: Synthetic polypeptide
APEAAGGPSVFLFPPKPKDTLYITREPEVTCVVVDVSHEDPEVKFNWYVDGVEVHNAKTKPREEQYNSTYRVVSVLTVLHQDWLNGKEYKCKVSNKALGAPIEKTISKAKGQPREPQVYTLPPSRDELTKNQVSLWCLVKGFYPSDIAVEWESFGTEWSNYKTTPPVLDSDGSFFLYSKLTVSKEEWQQGFVFSCSVMHEALHNHYTQKSLSLSPGK

SEQ ID NO: 295 - protein, 217 aa, Artificial Sequence
  Description of Artificial Sequence: Synthetic polypeptide
APELLGGPSVFLFPPKPKDTLMISRTPEVTCVVVDVSHEDPEVKFNWYVDGVEVHNAKTKPREEQYNSTYRVVSVLTVLHQDWLNGKEYKCKVSNKALPAPIEKTISKAKGQPREPQVYTLPPSRDELTKNQVSLSCAVKGFYPSDIAVEWESFGTEWSNYKTTPPVLDSDGSFFLVSKLTVSKEEWQQGFVFSCSVMHEALHNHYTQKSLSLSPGK

SEQ ID NO: 296 - protein, 217 aa, Artificial Sequence
  Description of Artificial Sequence: Synthetic polypeptide
APEAAGGPSVFLFPPKPKDTLMISRTPEVTCVVVDVSHEDPEVKFNWYVDGVEVHNAKTKPREEQYNSTYRVVSVLTVLHQDWLNGKEYKCKVSNKALPAPIEKTISKAKGQPREPQVYTLPPSRDELTKNQVSLSCAVKGFYPSDIAVEWESFGTEWSNYKTTPPVLDSDGSFFLVSKLTVSKEEWQQGFVFSCSVMHEALHNHYTQKSLSLSPGK

SEQ ID NO: 297 - protein, 217 aa, Artificial Sequence
  Description of Artificial Sequence: Synthetic polypeptide
APEAAGGPSVFLFPPKPKDTLMISRTPEVTCVVVDVSHEDPEVKFNWYVDGVEVHNAKTKPREEQYNSTYRVVSVLTVLHQDWLNGKEYKCKVSNKALGAPIEKTISKAKGQPREPQVYTLPPSRDELTKNQVSLSCAVKGFYPSDIAVEWESFGTEWSNYKTTPPVLDSDGSFFLVSKLTVSKEEWQQGFVFSCSVMHEALHNHYTQKSLSLSPGK

SEQ ID NO: 298 - protein, 217 aa, Artificial Sequence
  Description of Artificial Sequence: Synthetic polypeptide
APELLGGPSVFLFPPKPKDTLYITREPEVTCVVVDVSHEDPEVKFNWYVDGVEVHNAKTKPREEQYNSTYRVVSVLTVLHQDWLNGKEYKCKVSNKALPAPIEKTISKAKGQPREPQVYTLPPSRDELTKNQVSLSCAVKGFYPSDIAVEWESFGTEWSNYKTTPPVLDSDGSFFLVSKLTVSKEEWQQGFVFSCSVMHEALHNHYTQKSLSLSPGK

SEQ ID NO: 299 - protein, 217 aa, Artificial Sequence
  Description of Artificial Sequence: Synthetic polypeptide
APEAAGGPSVFLFPPKPKDTLYITREPEVTCVVVDVSHEDPEVKFNWYVDGVEVHNAKTKPREEQYNSTYRVVSVLTVLHQDWLNGKEYKCKVSNKALPAPIEKTISKAKGQPREPQVYTLPPSRDELTKNQVSLSCAVKGFYPSDIAVEWESFGTEWSNYKTTPPVLDSDGSFFLVSKLTVSKEEWQQGFVFSCSVMHEALHNHYTQKSLSLSPGK

SEQ ID NO: 300 - protein, 217 aa, Artificial Sequence
  Description of Artificial Sequence: Synthetic polypeptide
APEAAGGPSVFLFPPKPKDTLYITREPEVTCVVVDVSHEDPEVKFNWYVDGVEVHNAKTKPREEQYNSTYRVVSVLTVLHQDWLNGKEYKCKVSNKALGAPIEKTISKAKGQPREPQVYTLPPSRDELTKNQVSLSCAVKGFYPSDIAVEWESFGTEWSNYKTTPPVLDSDGSFFLVSKLTVSKEEWQQGFVFSCSVMHEALHNHYTQKSLSLSPGK

SEQ ID NO: 301 - protein, 217 aa, Artificial Sequence
  Description of Artificial Sequence: Synthetic polypeptide
APELLGGPSVFLFPPKPKDTLMISRTPEVTCVVVDVSHEDPEVKFNWYVDGVEVHNAKTKPREEQYNSTYRVVSVLTVLHQDWLNGKEYKCKVSNKALPAPIEKTISKAKGQPREPQVYTLPPSRDELTKNQVSLTCLVKGFYPSDIAVEWESFGTEWSSYKTTPPVLDSDGSFFLYSKLTVTKEEWQQGFVFSCSVLHEALHSHYTQKSLSLSPGK

SEQ ID NO: 302 - protein, 217 aa, Artificial Sequence
  Description of Artificial Sequence: Synthetic polypeptide
APELLGGPSVFLFPPKPKDTLMISRTPEVTCVVVDVSHEDPEVKFNWYVDGVEVHNAKTKPREEQYNSTYRVVSVLTVLHQDWLNGKEYKCKVSNKALPAPIEKTISKAKGQPREPQVYTLPPSRDELTKNQVSLWCLVKGFYPSDIAVEWESFGTEWSSYKTTPPVLDSDGSFFLYSKLTVTKEEWQQGFVFSCSVLHEALHSHYTQKSLSLSPGK

SEQ ID NO: 303 - protein, 217 aa, Artificial Sequence
  Description of Artificial Sequence: Synthetic polypeptide
APEAAGGPSVFLFPPKPKDTLMISRTPEVTCVVVDVSHEDPEVKFNWYVDGVEVHNAKTKPREEQYNSTYRVVSVLTVLHQDWLNGKEYKCKVSNKALPAPIEKTISKAKGQPREPQVYTLPPSRDELTKNQVSLWCLVKGFYPSDIAVEWESFGTEWSSYKTTPPVLDSDGSFFLYSKLTVTKEEWQQGFVFSCSVLHEALHSHYTQKSLSLSPGK

SEQ ID NO: 304 - protein, 217 aa, Artificial Sequence
  Description of Artificial Sequence: Synthetic polypeptide
APEAAGGPSVFLFPPKPKDTLMISRTPEVTCVVVDVSHEDPEVKFNWYVDGVEVHNAKTKPREEQYNSTYRVVSVLTVLHQDWLNGKEYKCKVSNKALGAPIEKTISKAKGQPREPQVYTLPPSRDELTKNQVSLWCLVKGFYPSDIAVEWESFGTEWSSYKTTPPVLDSDGSFFLYSKLTVTKEEWQQGFVFSCSVLHEALHSHYTQKSLSLSPGK

SEQ ID NO: 305 - protein, 217 aa, Artificial Sequence
  Description of Artificial Sequence: Synthetic polypeptide
APELLGGPSVFLFPPKPKDTLMISRTPEVTCVVVDVSHEDPEVKFNWYVDGVEVHNAKTKPREEQYNSTYRVVSVLTVLHQDWLNGKEYKCKVSNKALPAPIEKTISKAKGQPREPQVYTLPPSRDELTKNQVSLSCAVKGFYPSDIAVEWESFGTEWSSYKTTPPVLDSDGSFFLVSKLTVTKEEWQQGFVFSCSVLHEALHSHYTQKSLSLSPGK

SEQ ID NO: 306 - protein, 217 aa, Artificial Sequence
  Description of Artificial Sequence: Synthetic polypeptide
APEAAGGPSVFLFPPKPKDTLMISRTPEVTCVVVDVSHEDPEVKFNWYVDGVEVHNAKTKPREEQYNSTYRVVSVLTVLHQDWLNGKEYKCKVSNKALPAPIEKTISKAKGQPREPQVYTLPPSRDELTKNQVSLSCAVKGFYPSDIAVEWESFGTEWSSYKTTPPVLDSDGSFFLVSKLTVTKEEWQQGFVFSCSVLHEALHSHYTQKSLSLSPGK

SEQ ID NO: 307 - protein, 217 aa, Artificial Sequence
  Description of Artificial Sequence: Synthetic polypeptide
APEAAGGPSVFLFPPKPKDTLMISRTPEVTCVVVDVSHEDPEVKFNWYVDGVEVHNAKTKPREEQYNSTYRVVSVLTVLHQDWLNGKEYKCKVSNKALGAPIEKTISKAKGQPREPQVYTLPPSRDELTKNQVSLSCAVKGFYPSDIAVEWESFGTEWSSYKTTPPVLDSDGSFFLVSKLTVTKEEWQQGFVFSCSVLHEALHSHYTQKSLSLSPGK

SEQ ID NO: 308 - protein, 217 aa, Artificial Sequence
  Description of Artificial Sequence: Synthetic polypeptide
APELLGGPSVFLFPPKPKDTLMISRTPEVTCVVVDVSHEDPEVKFNWYVDGVEVHNAKTKPREEQYNSTYRVVSVLTVLHQDWLNGKEYKCKVSNKALPAPIEKTISKAKGQPREPQVYTLPPSRDELTKNQVSLTCLVKGFYPSDIAVEWESYGTEWANYKTTPPVLDSDGSFFLYSKLTVTKEEWQQGFVFSCSVLHEALHSHYTQKSLSLSPGK

SEQ ID NO: 309 - protein, 217 aa, Artificial Sequence
  Description of Artificial Sequence: Synthetic polypeptide
APELLGGPSVFLFPPKPKDTLMISRTPEVTCVVVDVSHEDPEVKFNWYVDGVEVHNAKTKPREEQYNSTYRVVSVLTVLHQDWLNGKEYKCKVSNKALPAPIEKTISKAKGQPREPQVYTLPPSRDELTKNQVSLWCLVKGFYPSDIAVEWESYGTEWANYKTTPPVLDSDGSFFLYSKLTVTKEEWQQGFVFSCSVLHEALHSHYTQKSLSLSPGK

SEQ ID NO: 310 - protein, 217 aa, Artificial Sequence
  Description of Artificial Sequence: Synthetic polypeptide
APEAAGGPSVFLFPPKPKDTLMISRTPEVTCVVVDVSHEDPEVKFNWYVDGVEVHNAKTKPREEQYNSTYRVVSVLTVLHQDWLNGKEYKCKVSNKALPAPIEKTISKAKGQPREPQVYTLPPSRDELTKNQVSLWCLVKGFYPSDIAVEWESYGTEWANYKTTPPVLDSDGSFFLYSKLTVTKEEWQQGFVFSCSVLHEALHSHYTQKSLSLSPGK

SEQ ID NO: 311 - protein, 217 aa, Artificial Sequence
  Description of Artificial Sequence: Synthetic polypeptide
APEAAGGPSVFLFPPKPKDTLMISRTPEVTCVVVDVSHEDPEVKFNWYVDGVEVHNAKTKPREEQYNSTYRVVSVLTVLHQDWLNGKEYKCKVSNKALGAPIEKTISKAKGQPREPQVYTLPPSRDELTKNQVSLWCLVKGFYPSDIAVEWESYGTEWANYKTTPPVLDSDGSFFLYSKLTVTKEEWQQGFVFSCSVLHEALHSHYTQKSLSLSPGK

SEQ ID NO: 312 - protein, 217 aa, Artificial Sequence
  Description of Artificial Sequence: Synthetic polypeptide
APELLGGPSVFLFPPKPKDTLMISRTPEVTCVVVDVSHEDPEVKFNWYVDGVEVHNAKTKPREEQYNSTYRVVSVLTVLHQDWLNGKEYKCKVSNKALPAPIEKTISKAKGQPREPQVYTLPPSRDELTKNQVSLSCAVKGFYPSDIAVEWESYGTEWANYKTTPPVLDSDGSFFLVSKLTVTKEEWQQGFVFSCSVLHEALHSHYTQKSLSLSPGK

SEQ ID NO: 313 - protein, 217 aa, Artificial Sequence
  Description of Artificial Sequence: Synthetic polypeptide
APEAAGGPSVFLFPPKPKDTLMISRTPEVTCVVVDVSHEDPEVKFNWYVDGVEVHNAKTKPREEQYNSTYRVVSVLTVLHQDWLNGKEYKCKVSNKALPAPIEKTISKAKGQPREPQVYTLPPSRDELTKNQVSLSCAVKGFYPSDIAVEWESYGTEWANYKTTPPVLDSDGSFFLVSKLTVTKEEWQQGFVFSCSVLHEALHSHYTQKSLSLSPGK

SEQ ID NO: 314 - protein, 217 aa, Artificial Sequence
  Description of Artificial Sequence: Synthetic polypeptide
APEAAGGPSVFLFPPKPKDTLMISRTPEVTCVVVDVSHEDPEVKFNWYVDGVEVHNAKTKPREEQYNSTYRVVSVLTVLHQDWLNGKEYKCKVSNKALGAPIEKTISKAKGQPREPQVYTLPPSRDELTKNQVSLSCAVKGFYPSDIAVEWESYGTEWANYKTTPPVLDSDGSFFLVSKLTVTKEEWQQGFVFSCSVLHEALHSHYTQKSLSLSPGK

SEQ ID NO: 315 - protein, 217 aa, Artificial Sequence
  Description of Artificial Sequence: Synthetic polypeptide
APELLGGPSVFLFPPKPKDTLMISRTPEVTCVVVDVSHEDPEVKFNWYVDGVEVHNAKTKPREEQYNSTYRVVSVLTVLHQDWLNGKEYKCKVSNKALPAPIEKTISKAKGQPREPQVYTLPPSRDELTKNQVSLTCLVKGFYPSDIAVEWESYGTEWVNYKTTPPVLDSDGSFFLYSKLTVTKEEWQQGFVFSCSVLHEALHSHYTQKSLSLSPGK

SEQ ID NO: 316 - protein, 217 aa, Artificial Sequence
  Description of Artificial Sequence: Synthetic polypeptide
APELLGGPSVFLFPPKPKDTLMISRTPEVTCVVVDVSHEDPEVKFNWYVDGVEVHNAKTKPREEQYNSTYRVVSVLTVLHQDWLNGKEYKCKVSNKALPAPIEKTISKAKGQPREPQVYTLPPSRDELTKNQVSLWCLVKGFYPSDIAVEWESYGTEWVNYKTTPPVLDSDGSFFLYSKLTVTKEEWQQGFVFSCSVLHEALHSHYTQKSLSLSPGK

SEQ ID NO: 317 - protein, 217 aa, Artificial Sequence
  Description of Artificial Sequence: Synthetic polypeptide
APEAAGGPSVFLFPPKPKDTLMISRTPEVTCVVVDVSHEDPEVKFNWYVDGVEVHNAKTKPREEQYNSTYRVVSVLTVLHQDWLNGKEYKCKVSNKALPAPIEKTISKAKGQPREPQVYTLPPSRDELTKNQVSLWCLVKGFYPSDIAVEWESYGTEWVNYKTTPPVLDSDGSFFLYSKLTVTKEEWQQGFVFSCSVLHEALHSHYTQKSLSLSPGK

SEQ ID NO: 318 - protein, 217 aa, Artificial Sequence
  Description of Artificial Sequence: Synthetic polypeptide
APEAAGGPSVFLFPPKPKDTLMISRTPEVTCVVVDVSHEDPEVKFNWYVDGVEVHNAKTKPREEQYNSTYRVVSVLTVLHQDWLNGKEYKCKVSNKALGAPIEKTISKAKGQPREPQVYTLPPSRDELTKNQVSLWCLVKGFYPSDIAVEWESYGTEWVNYKTTPPVLDSDGSFFLYSKLTVTKEEWQQGFVFSCSVLHEALHSHYTQKSLSLSPGK

SEQ ID NO: 319 - protein, 217 aa, Artificial Sequence
  Description of Artificial Sequence: Synthetic polypeptide
APELLGGPSVFLFPPKPKDTLMISRTPEVTCVVVDVSHEDPEVKFNWYVDGVEVHNAKTKPREEQYNSTYRVVSVLTVLHQDWLNGKEYKCKVSNKALPAPIEKTISKAKGQPREPQVYTLPPSRDELTKNQVSLSCAVKGFYPSDIAVEWESYGTEWVNYKTTPPVLDSDGSFFLVSKLTVTKEEWQQGFVFSCSVLHEALHSHYTQKSLSLSPGK

SEQ ID NO: 320 - protein, 217 aa, Artificial Sequence
  Description of Artificial Sequence: Synthetic polypeptide
APEAAGGPSVFLFPPKPKDTLMISRTPEVTCVVVDVSHEDPEVKFNWYVDGVEVHNAKTKPREEQYNSTYRVVSVLTVLHQDWLNGKEYKCKVSNKALPAPIEKTISKAKGQPREPQVYTLPPSRDELTKNQVSLSCAVKGFYPSDIAVEWESYGTEWVNYKTTPPVLDSDGSFFLVSKLTVTKEEWQQGFVFSCSVLHEALHSHYTQKSLSLSPGK

SEQ ID NO: 321 - protein, 217 aa, Artificial Sequence
  Description of Artificial Sequence: Synthetic polypeptide
APEAAGGPSVFLFPPKPKDTLMISRTPEVTCVVVDVSHEDPEVKFNWYVDGVEVHNAKTKPREEQYNSTYRVVSVLTVLHQDWLNGKEYKCKVSNKALGAPIEKTISKAKGQPREPQVYTLPPSRDELTKNQVSLSCAVKGFYPSDIAVEWESYGTEWVNYKTTPPVLDSDGSFFLVSKLTVTKEEWQQGFVFSCSVLHEALHSHYTQKSLSLSPGK

SEQ ID NO: 322 - protein, 217 aa, Artificial Sequence
  Description of Artificial Sequence: Synthetic polypeptide
APELLGGPSVFLFPPKPKDTLMISRTPEVTCVVVDVSHEDPEVKFNWYVDGVEVHNAKTKPREEQYNSTYRVVSVLTVLHQDWLNGKEYKCKVSNKALPAPIEKTISKAKGQPREPQVYTLPPSRDELTKNQVSLTCLVKGFYPSDIAVEWESYGTEWSNYKTTPPVLDSDGSFFLYSKLTVSKEEWQQGFVFSCSVLHEALHSHYTQKSLSLSPGK

SEQ ID NO: 323 - protein, 217 aa, Artificial Sequence
  Description of Artificial Sequence: Synthetic polypeptide
APELLGGPSVFLFPPKPKDTLMISRTPEVTCVVVDVSHEDPEVKFNWYVDGVEVHNAKTKPREEQYNSTYRVVSVLTVLHQDWLNGKEYKCKVSNKALPAPIEKTISKAKGQPREPQVYTLPPSRDELTKNQVSLWCLVKGFYPSDIAVEWESYGTEWSNYKTTPPVLDSDGSFFLYSKLTVSKEEWQQGFVFSCSVLHEALHSHYTQKSLSLSPGK

SEQ ID NO: 324 - protein, 217 aa, Artificial Sequence
  Description of Artificial Sequence: Synthetic polypeptide
APEAAGGPSVFLFPPKPKDTLMISRTPEVTCVVVDVSHEDPEVKFNWYVDGVEVHNAKTKPREEQYNSTYRVVSVLTVLHQDWLNGKEYKCKVSNKALPAPIEKTISKAKGQPREPQVYTLPPSRDELTKNQVSLWCLVKGFYPSDIAVEWESYGTEWSNYKTTPPVLDSDGSFFLYSKLTVSKEEWQQGFVFSCSVLHEALHSHYTQKSLSLSPGK

SEQ ID NO: 325 - protein, 217 aa, Artificial Sequence
  Description of Artificial Sequence: Synthetic polypeptide
APEAAGGPSVFLFPPKPKDTLMISRTPEVTCVVVDVSHEDPEVKFNWYVDGVEVHNAKTKPREEQYNSTYRVVSVLTVLHQDWLNGKEYKCKVSNKALGAPIEKTISKAKGQPREPQVYTLPPSRDELTKNQVSLWCLVKGFYPSDIAVEWESYGTEWSNYKTTPPVLDSDGSFFLYSKLTVSKEEWQQGFVFSCSVLHEALHSHYTQKSLSLSPGK

SEQ ID NO: 326 - protein, 217 aa, Artificial Sequence
  Description of Artificial Sequence: Synthetic polypeptide
APELLGGPSVFLFPPKPKDTLMISRTPEVTCVVVDVSHEDPEVKFNWYVDGVEVHNAKTKPREEQYNSTYRVVSVLTVLHQDWLNGKEYKCKVSNKALPAPIEKTISKAKGQPREPQVYTLPPSRDELTKNQVSLSCAVKGFYPSDIAVEWESYGTEWSNYKTTPPVLDSDGSFFLVSKLTVSKEEWQQGFVFSCSVLHEALHSHYTQKSLSLSPGK

SEQ ID NO: 327 - protein, 217 aa, Artificial Sequence
  Description of Artificial Sequence: Synthetic polypeptide
APEAAGGPSVFLFPPKPKDTLMISRTPEVTCVVVDVSHEDPEVKFNWYVDGVEVHNAKTKPREEQYNSTYRVVSVLTVLHQDWLNGKEYKCKVSNKALPAPIEKTISKAKGQPREPQVYTLPPSRDELTKNQVSLSCAVKGFYPSDIAVEWESYGTEWSNYKTTPPVLDSDGSFFLVSKLTVSKEEWQQGFVFSCSVLHEALHSHYTQKSLSLSPGK

SEQ ID NO: 328 - protein, 217 aa, Artificial Sequence
  Description of Artificial Sequence: Synthetic polypeptide
APEAAGGPSVFLFPPKPKDTLMISRTPEVTCVVVDVSHEDPEVKFNWYVDGVEVHNAKTKPREEQYNSTYRVVSVLTVLHQDWLNGKEYKCKVSNKALGAPIEKTISKAKGQPREPQVYTLPPSRDELTKNQVSLSCAVKGFYPSDIAVEWESYGTEWSNYKTTPPVLDSDGSFFLVSKLTVSKEEWQQGFVFSCSVLHEALHSHYTQKSLSLSPGK

SEQ ID NO: 329 - protein, 217 aa, Artificial Sequence
  Description of Artificial Sequence: Synthetic polypeptide
APELLGGPSVFLFPPKPKDTLMISRTPEVTCVVVDVSHEDPEVKFNWYVDGVEVHNAKTKPREEQYNSTYRVVSVLTVLHQDWLNGKEYKCKVSNKALPAPIEKTISKAKGQPREPQVYTLPPSRDELTKNQVSLTCLVKGFYPSDIAVLWESYGTEWASYKTTPPVLDSDGSFFLYSKLTVTKEEWQQGFVFSCSVLHEALHSHYTQKSLSLSPGK

SEQ ID NO: 330 - protein, 217 aa, Artificial Sequence
  Description of Artificial Sequence: Synthetic polypeptide
APELLGGPSVFLFPPKPKDTLMISRTPEVTCVVVDVSHEDPEVKFNWYVDGVEVHNAKTKPREEQYNSTYRVVSVLTVLHQDWLNGKEYKCKVSNKALPAPIEKTISKAKGQPREPQVYTLPPSRDELTKNQVSLWCLVKGFYPSDIAVLWESYGTEWASYKTTPPVLDSDGSFFLYSKLTVTKEEWQQGFVFSCSVLHEALHSHYTQKSLSLSPGK

SEQ ID NO: 331 - protein, 217 aa, Artificial Sequence
  Description of Artificial Sequence: Synthetic polypeptide
APEAAGGPSVFLFPPKPKDTLMISRTPEVTCVVVDVSHEDPEVKFNWYVDGVEVHNAKTKPREEQYNSTYRVVSVLTVLHQDWLNGKEYKCKVSNKALPAPIEKTISKAKGQPREPQVYTLPPSRDELTKNQVSLWCLVKGFYPSDIAVLWESYGTEWASYKTTPPVLDSDGSFFLYSKLTVTKEEWQQGFVFSCSVLHEALHSHYTQKSLSLSPGK

SEQ ID NO: 332 - protein, 217 aa, Artificial Sequence
  Description of Artificial Sequence: Synthetic polypeptide
APEAAGGPSVFLFPPKPKDTLMISRTPEVTCVVVDVSHEDPEVKFNWYVDGVEVHNAKTKPREEQYNSTYRVVSVLTVLHQDWLNGKEYKCKVSNKALGAPIEKTISKAKGQPREPQVYTLPPSRDELTKNQVSLWCLVKGFYPSDIAVLWESYGTEWASYKTTPPVLDSDGSFFLYSKLTVTKEEWQQGFVFSCSVLHEALHSHYTQKSLSLSPGK

SEQ ID NO: 333 - protein, 217 aa, Artificial Sequence
  Description of Artificial Sequence: Synthetic polypeptide
APELLGGPSVFLFPPKPKDTLMISRTPEVTCVVVDVSHEDPEVKFNWYVDGVEVHNAKTKPREEQYNSTYRVVSVLTVLHQDWLNGKEYKCKVSNKALPAPIEKTISKAKGQPREPQVYTLPPSRDELTKNQVSLSCAVKGFYPSDIAVLWESYGTEWASYKTTPPVLDSDGSFFLVSKLTVTKEEWQQGFVFSCSVLHEALHSHYTQKSLSLSPGK

SEQ ID NO: 334 - protein, 217 aa, Artificial Sequence
  Description of Artificial Sequence: Synthetic polypeptide
APEAAGGPSVFLFPPKPKDTLMISRTPEVTCVVVDVSHEDPEVKFNWYVDGVEVHNAKTKPREEQYNSTYRVVSVLTVLHQDWLNGKEYKCKVSNKALPAPIEKTISKAKGQPREPQVYTLPPSRDELTKNQVSLSCAVKGFYPSDIAVLWESYGTEWASYKTTPPVLDSDGSFFLVSKLTVTKEEWQQGFVFSCSVLHEALHSHYTQKSLSLSPGK

SEQ ID NO: 335 - protein, 217 aa, Artificial Sequence
  Description of Artificial Sequence: Synthetic polypeptide
APEAAGGPSVFLFPPKPKDTLMISRTPEVTCVVVDVSHEDPEVKFNWYVDGVEVHNAKTKPREEQYNSTYRVVSVLTVLHQDWLNGKEYKCKVSNKALGAPIEKTISKAKGQPREPQVYTLPPSRDELTKNQVSLSCAVKGFYPSDIAVLWESYGTEWASYKTTPPVLDSDGSFFLVSKLTVTKEEWQQGFVFSCSVLHEALHSHYTQKSLSLSPGK

SEQ ID NO: 336 - protein, 217 aa, Artificial Sequence
  Description of Artificial Sequence: Synthetic polypeptide
APELLGGPSVFLFPPKPKDTLMISRTPEVTCVVVDVSHEDPEVKFNWYVDGVEVHNAKTKPREEQYNSTYRVVSVLTVLHQDWLNGKEYKCKVSNKALPAPIEKTISKAKGQPREPQVYTLPPSRDELTKNQVSLTCLVKGFYPSDIAVEWESYGTEWSNYKTTPPVLDSDGSFFLYSKLTVTKEEWQQGFVFSCSVLHEALHSHYTQKSLSLSPGK

SEQ ID NO: 337 - protein, 217 aa, Artificial Sequence
  Description of Artificial Sequence: Synthetic polypeptide
APELLGGPSVFLFPPKPKDTLMISRTPEVTCVVVDVSHEDPEVKFNWYVDGVEVHNAKTKPREEQYNSTYRVVSVLTVLHQDWLNGKEYKCKVSNKALPAPIEKTISKAKGQPREPQVYTLPPSRDELTKNQVSLWCLVKGFYPSDIAVEWESYGTEWSNYKTTPPVLDSDGSFFLYSKLTVTKEEWQQGFVFSCSVLHEALHSHYTQKSLSLSPGK

SEQ ID NO: 338 - protein, 217 aa, Artificial Sequence
  Description of Artificial Sequence: Synthetic polypeptide
APEAAGGPSVFLFPPKPKDTLMISRTPEVTCVVVDVSHEDPEVKFNWYVDGVEVHNAKTKPREEQYNSTYRVVSVLTVLHQDWLNGKEYKCKVSNKALPAPIEKTISKAKGQPREPQVYTLPPSRDELTKNQVSLWCLVKGFYPSDIAVEWESYGTEWSNYKTTPPVLDSDGSFFLYSKLTVTKEEWQQGFVFSCSVLHEALHSHYTQKSLSLSPGK

SEQ ID NO: 339 - protein, 217 aa, Artificial Sequence
  Description of Artificial Sequence: Synthetic polypeptide
APEAAGGPSVFLFPPKPKDTLMISRTPEVTCVVVDVSHEDPEVKFNWYVDGVEVHNAKTKPREEQYNSTYRVVSVLTVLHQDWLNGKEYKCKVSNKALGAPIEKTISKAKGQPREPQVYTLPPSRDELTKNQVSLWCLVKGFYPSDIAVEWESYGTEWSNYKTTPPVLDSDGSFFLYSKLTVTKEEWQQGFVFSCSVLHEALHSHYTQKSLSLSPGK

SEQ ID NO: 340 - protein, 217 aa, Artificial Sequence
  Description of Artificial Sequence: Synthetic polypeptide
APELLGGPSVFLFPPKPKDTLMISRTPEVTCVVVDVSHEDPEVKFNWYVDGVEVHNAKTKPREEQYNSTYRVVSVLTVLHQDWLNGKEYKCKVSNKALPAPIEKTISKAKGQPREPQVYTLPPSRDELTKNQVSLSCAVKGFYPSDIAVEWESYGTEWSNYKTTPPVLDSDGSFFLVSKLTVTKEEWQQGFVFSCSVLHEALHSHYTQKSLSLSPGK

SEQ ID NO: 341 - protein, 217 aa, Artificial Sequence
  Description of Artificial Sequence: Synthetic polypeptide
APEAAGGPSVFLFPPKPKDTLMISRTPEVTCVVVDVSHEDPEVKFNWYVDGVEVHNAKTKPREEQYNSTYRVVSVLTVLHQDWLNGKEYKCKVSNKALPAPIEKTISKAKGQPREPQVYTLPPSRDELTKNQVSLSCAVKGFYPSDIAVEWESYGTEWSNYKTTPPVLDSDGSFFLVSKLTVTKEEWQQGFVFSCSVLHEALHSHYTQKSLSLSPGK

SEQ ID NO: 342 - protein, 217 aa, Artificial Sequence
  Description of Artificial Sequence: Synthetic polypeptide
APEAAGGPSVFLFPPKPKDTLMISRTPEVTCVVVDVSHEDPEVKFNWYVDGVEVHNAKTKPREEQYNSTYRVVSVLTVLHQDWLNGKEYKCKVSNKALGAPIEKTISKAKGQPREPQVYTLPPSRDELTKNQVSLSCAVKGFYPSDIAVEWESYGTEWSNYKTTPPVLDSDGSFFLVSKLTVTKEEWQQGFVFSCSVLHEALHSHYTQKSLSLSPGK

SEQ ID NO: 343 - protein, 217 aa, Artificial Sequence
  Description of Artificial Sequence: Synthetic polypeptide
APELLGGPSVFLFPPKPKDTLMISRTPEVTCVVVDVSHEDPEVKFNWYVDGVEVHNAKTKPREEQYNSTYRVVSVLTVLHQDWLNGKEYKCKVSNKALPAPIEKTISKAKGQPREPQVYTLPPSRDELTKNQVSLTCLVKGFYPSDIAVWWESYGTEWSSYKTTPPVLDSDGSFFLYSKLTVTKEEWQQGFVFSCSVLHEALHSHYTQKSLSLSPGK

SEQ ID NO: 344 - protein, 217 aa, Artificial Sequence
  Description of Artificial Sequence: Synthetic polypeptide
APELLGGPSVFLFPPKPKDTLMISRTPEVTCVVVDVSHEDPEVKFNWYVDGVEVHNAKTKPREEQYNSTYRVVSVLTVLHQDWLNGKEYKCKVSNKALPAPIEKTISKAKGQPREPQVYTLPPSRDELTKNQVSLWCLVKGFYPSDIAVWWESYGTEWSSYKTTPPVLDSDGSFFLYSKLTVTKEEWQQGFVFSCSVLHEALHSHYTQKSLSLSPGK

SEQ ID NO: 345 - protein, 217 aa, Artificial Sequence
  Description of Artificial Sequence: Synthetic polypeptide
APEAAGGPSVFLFPPKPKDTLMISRTPEVTCVVVDVSHEDPEVKFNWYVDGVEVHNAKTKPREEQYNSTYRVVSVLTVLHQDWLNGKEYKCKVSNKALPAPIEKTISKAKGQPREPQVYTLPPSRDELTKNQVSLWCLVKGFYPSDIAVWWESYGTEWSSYKTTPPVLDSDGSFFLYSKLTVTKEEWQQGFVFSCSVLHEALHSHYTQKSLSLSPGK

SEQ ID NO: 346 - protein, 217 aa, Artificial Sequence
  Description of Artificial Sequence: Synthetic polypeptide
APEAAGGPSVFLFPPKPKDTLMISRTPEVTCVVVDVSHEDPEVKFNWYVDGVEVHNAKTKPREEQYNSTYRVVSVLTVLHQDWLNGKEYKCKVSNKALGAPIEKTISKAKGQPREPQVYTLPPSRDELTKNQVSLWCLVKGFYPSDIAVWWESYGTEWSSYKTTPPVLDSDGSFFLYSKLTVTKEEWQQGFVFSCSVLHEALHSHYTQKSLSLSPGK

SEQ ID NO: 347 - protein, 217 aa, Artificial Sequence
  Description of Artificial Sequence: Synthetic polypeptide
APELLGGPSVFLFPPKPKDTLMISRTPEVTCVVVDVSHEDPEVKFNWYVDGVEVHNAKTKPREEQYNSTYRVVSVLTVLHQDWLNGKEYKCKVSNKALPAPIEKTISKAKGQPREPQVYTLPPSRDELTKNQVSLSCAVKGFYPSDIAVWWESYGTEWSSYKTTPPVLDSDGSFFLVSKLTVTKEEWQQGFVFSCSVLHEALHSHYTQKSLSLSPGK

SEQ ID NO: 348 - protein, 217 aa, Artificial Sequence
  Description of Artificial Sequence: Synthetic polypeptide
APEAAGGPSVFLFPPKPKDTLMISRTPEVTCVVVDVSHEDPEVKFNWYVDGVEVHNAKTKPREEQYNSTYRVVSVLTVLHQDWLNGKEYKCKVSNKALPAPIEKTISKAKGQPREPQVYTLPPSRDELTKNQVSLSCAVKGFYPSDIAVWWESYGTEWSSYKTTPPVLDSDGSFFLVSKLTVTKEEWQQGFVFSCSVLHEALHSHYTQKSLSLSPGK

SEQ ID NO: 349 - protein, 217 aa, Artificial Sequence
  Description of Artificial Sequence: Synthetic polypeptide
APEAAGGPSVFLFPPKPKDTLMISRTPEVTCVVVDVSHEDPEVKFNWYVDGVEVHNAKTKPREEQYNSTYRVVSVLTVLHQDWLNGKEYKCKVSNKALGAPIEKTISKAKGQPREPQVYTLPPSRDELTKNQVSLSCAVKGFYPSDIAVWWESYGTEWSSYKTTPPVLDSDGSFFLVSKLTVTKEEWQQGFVFSCSVLHEALHSHYTQKSLSLSPGK

SEQ ID NO: 350 - protein, 217 aa, Artificial Sequence
  Description of Artificial Sequence: Synthetic polypeptide
APELLGGPSVFLFPPKPKDTLMISRTPEVTCVVVDVSHEDPEVKFNWYVDGVEVHNAKTKPREEQYNSTYRVVSVLTVLHQDWLNGKEYKCKVSNKALPAPIEKTISKAKGQPREPQVYTLPPSRDELTKNQVSLTCLVKGFYPSDIAVEWESFGTEWSSYKTTPPVLDSDGSFFLYSKLTVSKEEWQQGFVFSCSVLHEALHSHYTQKSLSLSPGK

SEQ ID NO: 351 - protein, 217 aa, Artificial Sequence
  Description of Artificial Sequence: Synthetic polypeptide
APELLGGPSVFLFPPKPKDTLMISRTPEVTCVVVDVSHEDPEVKFNWYVDGVEVHNAKTKPREEQYNSTYRVVSVLTVLHQDWLNGKEYKCKVSNKALPAPIEKTISKAKGQPREPQVYTLPPSRDELTKNQVSLWCLVKGFYPSDIAVEWESFGTEWSSYKTTPPVLDSDGSFFLYSKLTVSKEEWQQGFVFSCSVLHEALHSHYTQKSLSLSPGK

SEQ ID NO: 352 - protein, 217 aa, Artificial Sequence
  Description of Artificial Sequence: Synthetic polypeptide
APEAAGGPSVFLFPPKPKDTLMISRTPEVTCVVVDVSHEDPEVKFNWYVDGVEVHNAKTKPREEQYNSTYRVVSVLTVLHQDWLNGKEYKCKVSNKALPAPIEKTISKAKGQPREPQVYTLPPSRDELTKNQVSLWCLVKGFYPSDIAVEWESFGTEWSSYKTTPPVLDSDGSFFLYSKLTVSKEEWQQGFVFSCSVLHEALHSHYTQKSLSLSPGK

SEQ ID NO: 353 - protein, 217 aa, Artificial Sequence
  Description of Artificial Sequence: Synthetic polypeptide
APEAAGGPSVFLFPPKPKDTLMISRTPEVTCVVVDVSHEDPEVKFNWYVDGVEVHNAKTKPREEQYNSTYRVVSVLTVLHQDWLNGKEYKCKVSNKALGAPIEKTISKAKGQPREPQVYTLPPSRDELTKNQVSLWCLVKGFYPSDIAVEWESFGTEWSSYKTTPPVLDSDGSFFLYSKLTVSKEEWQQGFVFSCSVLHEALHSHYTQKSLSLSPGK

SEQ ID NO: 354 - protein, 217 aa, Artificial Sequence
  Description of Artificial Sequence: Synthetic polypeptide
APELLGGPSVFLFPPKPKDTLMISRTPEVTCVVVDVSHEDPEVKFNWYVDGVEVHNAKTKPREEQYNSTYRVVSVLTVLHQDWLNGKEYKCKVSNKALPAPIEKTISKAKGQPREPQVYTLPPSRDELTKNQVSLSCAVKGFYPSDIAVEWESFGTEWSSYKTTPPVLDSDGSFFLVSKLTVSKEEWQQGFVFSCSVLHEALHSHYTQKSLSLSPGK

SEQ ID NO: 355 - protein, 217 aa, Artificial Sequence
  Description of Artificial Sequence: Synthetic polypeptide
APEAAGGPSVFLFPPKPKDTLMISRTPEVTCVVVDVSHEDPEVKFNWYVDGVEVHNAKTKPREEQYNSTYRVVSVLTVLHQDWLNGKEYKCKVSNKALPAPIEKTISKAKGQPREPQVYTLPPSRDELTKNQVSLSCAVKGFYPSDIAVEWESFGTEWSSYKTTPPVLDSDGSFFLVSKLTVSKEEWQQGFVFSCSVLHEALHSHYTQKSLSLSPGK

SEQ ID NO: 356 - protein, 217 aa, Artificial Sequence
  Description of Artificial Sequence: Synthetic polypeptide
APEAAGGPSVFLFPPKPKDTLMISRTPEVTCVVVDVSHEDPEVKFNWYVDGVEVHNAKTKPREEQYNSTYRVVSVLTVLHQDWLNGKEYKCKVSNKALGAPIEKTISKAKGQPREPQVYTLPPSRDELTKNQVSLSCAVKGFYPSDIAVEWESFGTEWSSYKTTPPVLDSDGSFFLVSKLTVSKEEWQQGFVFSCSVLHEALHSHYTQKSLSLSPGK

SEQ ID NO: 357 - protein, 217 aa, Artificial Sequence
  Description of Artificial Sequence: Synthetic polypeptide
APELLGGPSVFLFPPKPKDTLMISRTPEVTCVVVDVSHEDPEVKFNWYVDGVEVHNAKTKPREEQYNSTYRVVSVLTVLHQDWLNGKEYKCKVSNKALPAPIEKTISKAKGQPREPQVYTLPPSRDELTKNQVSLTCLVKGFYPSDIAVEWESYGTEWANYKTTPPVLDSDGSFFLYSKLTVSKSEWQQGFVFSCSVLHEALHSHYTQKSLSLSPGK

SEQ ID NO: 358 - protein, 217 aa, Artificial Sequence
  Description of Artificial Sequence: Synthetic polypeptide
APELLGGPSVFLFPPKPKDTLMISRTPEVTCVVVDVSHEDPEVKFNWYVDGVEVHNAKTKPREEQYNSTYRVVSVLTVLHQDWLNGKEYKCKVSNKALPAPIEKTISKAKGQPREPQVYTLPPSRDELTKNQVSLWCLVKGFYPSDIAVEWESYGTEWANYKTTPPVLDSDGSFFLYSKLTVSKSEWQQGFVFSCSVLHEALHSHYTQKSLSLSPGK

SEQ ID NO: 359 - protein, 217 aa, Artificial Sequence
  Description of Artificial Sequence: Synthetic polypeptide
APEAAGGPSVFLFPPKPKDTLMISRTPEVTCVVVDVSHEDPEVKFNWYVDGVEVHNAKTKPREEQYNSTYRVVSVLTVLHQDWLNGKEYKCKVSNKALPAPIEKTISKAKGQPREPQVYTLPPSRDELTKNQVSLWCLVKGFYPSDIAVEWESYGTEWANYKTTPPVLDSDGSFFLYSKLTVSKSEWQQGFVFSCSVLHEALHSHYTQKSLSLSPGK

SEQ ID NO: 360 - protein, 217 aa, Artificial Sequence
  Description of Artificial Sequence: Synthetic polypeptide
APEAAGGPSVFLFPPKPKDTLMISRTPEVTCVVVDVSHEDPEVKFNWYVDGVEVHNAKTKPREEQYNSTYRVVSVLTVLHQDWLNGKEYKCKVSNKALGAPIEKTISKAKGQPREPQVYTLPPSRDELTKNQVSLWCLVKGFYPSDIAVEWESYGTEWANYKTTPPVLDSDGSFFLYSKLTVSKSEWQQGFVFSCSVLHEALHSHYTQKSLSLSPGK

SEQ ID NO: 361 - protein, 217 aa, Artificial Sequence
  Description of Artificial Sequence: Synthetic polypeptide
APELLGGPSVFLFPPKPKDTLMISRTPEVTCVVVDVSHEDPEVKFNWYVDGVEVHNAKTKPREEQYNSTYRVVSVLTVLHQDWLNGKEYKCKVSNKALPAPIEKTISKAKGQPREPQVYTLPPSRDELTKNQVSLSCAVKGFYPSDIAVEWESYGTEWANYKTTPPVLDSDGSFFLVSKLTVSKSEWQQGFVFSCSVLHEALHSHYTQKSLSLSPGK

SEQ ID NO: 362 - protein, 217 aa, Artificial Sequence
  Description of Artificial Sequence: Synthetic polypeptide
APEAAGGPSVFLFPPKPKDTLMISRTPEVTCVVVDVSHEDPEVKFNWYVDGVEVHNAKTKPREEQYNSTYRVVSVLTVLHQDWLNGKEYKCKVSNKALPAPIEKTISKAKGQPREPQVYTLPPSRDELTKNQVSLSCAVKGFYPSDIAVEWESYGTEWANYKTTPPVLDSDGSFFLVSKLTVSKSEWQQGFVFSCSVLHEALHSHYTQKSLSLSPGK

SEQ ID NO: 363 - protein, 217 aa, Artificial Sequence
  Description of Artificial Sequence: Synthetic polypeptide
APEAAGGPSVFLFPPKPKDTLMISRTPEVTCVVVDVSHEDPEVKFNWYVDGVEVHNAKTKPREEQYNSTYRVVSVLTVLHQDWLNGKEYKCKVSNKALGAPIEKTISKAKGQPREPQVYTLPPSRDELTKNQVSLSCAVKGFYPSDIAVEWESYGTEWANYKTTPPVLDSDGSFFLVSKLTVSKSEWQQGFVFSCSVLHEALHSHYTQKSLSLSPGK

SEQ ID NO: 364 - protein, 217 aa, Artificial Sequence
  Description of Artificial Sequence: Synthetic polypeptide
APELLGGPSVFLFPPKPKDTLMISRTPEVTCVVVDVSHEDPEVKFNWYVDGVEVHNAKTKPREEQYNSTYRVVSVLTVLHQDWLNGKEYKCKVSNKALPAPIEKTISKAKGQPREPQVYTLPPSRDELTKNQVSLTCLVKGFYPSDIAVEWESFGTEWSNYKTTPPVLDSDGSFFLYSKLTVSKEEWQQGFVFSCSVLHEALHSHYTQKSLSLSPGK

SEQ ID NO: 365 - protein, 217 aa, Artificial Sequence
  Description of Artificial Sequence: Synthetic polypeptide
APELLGGPSVFLFPPKPKDTLMISRTPEVTCVVVDVSHEDPEVKFNWYVDGVEVHNAKTKPREEQYNSTYRVVSVLTVLHQDWLNGKEYKCKVSNKALPAPIEKTISKAKGQPREPQVYTLPPSRDELTKNQVSLWCLVKGFYPSDIAVEWESFGTEWSNYKTTPPVLDSDGSFFLYSKLTVSKEEWQQGFVFSCSVLHEALHSHYTQKSLSLSPGK

SEQ ID NO: 366 - protein, 217 aa, Artificial Sequence
  Description of Artificial Sequence: Synthetic polypeptide
APEAAGGPSVFLFPPKPKDTLMISRTPEVTCVVVDVSHEDPEVKFNWYVDGVEVHNAKTKPREEQYNSTYRVVSVLTVLHQDWLNGKEYKCKVSNKALPAPIEKTISKAKGQPREPQVYTLPPSRDELTKNQVSLWCLVKGFYPSDIAVEWESFGTEWSNYKTTPPVLDSDGSFFLYSKLTVSKEEWQQGFVFSCSVLHEALHSHYTQKSLSLSPGK

SEQ ID NO: 367 - protein, 217 aa, Artificial Sequence
  Description of Artificial Sequence: Synthetic polypeptide
APEAAGGPSVFLFPPKPKDTLMISRTPEVTCVVVDVSHEDPEVKFNWYVDGVEVHNAKTKPREEQYNSTYRVVSVLTVLHQDWLNGKEYKCKVSNKALGAPIEKTISKAKGQPREPQVYTLPPSRDELTKNQVSLWCLVKGFYPSDIAVEWESFGTEWSNYKTTPPVLDSDGSFFLYSKLTVSKEEWQQGFVFSCSVLHEALHSHYTQKSLSLSPGK

SEQ ID NO: 368 - protein, 217 aa, Artificial Sequence
  Description of Artificial Sequence: Synthetic polypeptide
APELLGGPSVFLFPPKPKDTLMISRTPEVTCVVVDVSHEDPEVKFNWYVDGVEVHNAKTKPREEQYNSTYRVVSVLTVLHQDWLNGKEYKCKVSNKALPAPIEKTISKAKGQPREPQVYTLPPSRDELTKNQVSLSCAVKGFYPSDIAVEWESFGTEWSNYKTTPPVLDSDGSFFLVSKLTVSKEEWQQGFVFSCSVLHEALHSHYTQKSLSLSPGK

SEQ ID NO: 369 - protein, 217 aa, Artificial Sequence
  Description of Artificial Sequence: Synthetic polypeptide
APEAAGGPSVFLFPPKPKDTLMISRTPEVTCVVVDVSHEDPEVKFNWYVDGVEVHNAKTKPREEQYNSTYRVVSVLTVLHQDWLNGKEYKCKVSNKALPAPIEKTISKAKGQPREPQVYTLPPSRDELTKNQVSLSCAVKGFYPSDIAVEWESFGTEWSNYKTTPPVLDSDGSFFLVSKLTVSKEEWQQGFVFSCSVLHEALHSHYTQKSLSLSPGK

SEQ ID NO: 370 - protein, 217 aa, Artificial Sequence
  Description of Artificial Sequence: Synthetic polypeptide
APEAAGGPSVFLFPPKPKDTLMISRTPEVTCVVVDVSHEDPEVKFNWYVDGVEVHNAKTKPREEQYNSTYRVVSVLTVLHQDWLNGKEYKCKVSNKALGAPIEKTISKAKGQPREPQVYTLPPSRDELTKNQVSLSCAVKGFYPSDIAVEWESFGTEWSNYKTTPPVLDSDGSFFLVSKLTVSKEEWQQGFVFSCSVLHEALHSHYTQKSLSLSPGK

SEQ ID NO: 371 - protein, 5 aa, Artificial Sequence
  Description of Artificial Sequence: Synthetic peptide
GGGGS

SEQ ID NO: 372 - protein, 10 aa, Artificial Sequence
  Description of Artificial Sequence: Synthetic peptide
GGGGSGGGGS

SEQ ID NO: 373 - protein, 15 aa, Artificial Sequence
  Description of Artificial Sequence: Synthetic peptide
GGGGSGGGGSGGGGS

SEQ ID NO: 374 - protein, 19 aa, Artificial Sequence
  Description of Artificial Sequence: Synthetic peptide
RTVAGGGGSGGGGSGGGGS

SEQ ID NO: 375 - protein, 19 aa, Artificial Sequence
  Description of Artificial Sequence: Synthetic peptide
ASTKGGGGSGGGGSGGGGS

SEQ ID NO: 376 - protein, 15 aa, Homo sapiens
EPKSCDKTHTCPPCP

SEQ ID NO: 377 - protein, 217 aa, Artificial Sequence
  Description of Artificial Sequence: Synthetic polypeptide
APELLGGPSVFLFPPKPKDTLMISRTPEVTCVVVDVSHEDPEVKFNWYVDGVEVHNAKTKPREEQYNSTYRVVSVLTVLHQDWLNGKEYKCKVSNKALPAPIEKTISKAKGQPREPQVYTLPPSRDELTKNQVSLSCAVKGFYPSDIAVEWESNGQPENNYKTTPPVLDSDGSFFLVSKLTVDKSRWQQGNVFSCSVMHEALHNHYTQKSLSLSPGK

SEQ ID NO: 378 - protein, 217 aa, Artificial Sequence
  Description of Artificial Sequence: Synthetic polypeptide
APEAAGGPSVFLFPPKPKDTLMISRTPEVTCVVVDVSHEDPEVKFNWYVDGVEVHNAKTKPREEQYNSTYRVVSVLTVLHQDWLNGKEYKCKVSNKALPAPIEKTISKAKGQPREPQVYTLPPSRDELTKNQVSLSCAVKGFYPSDIAVEWESNGQPENNYKTTPPVLDSDGSFFLVSKLTVDKSRWQQGNVFSCSVMHEALHNHYTQKSLSLSPGK

SEQ ID NO: 379 - protein, 217 aa, Artificial Sequence
  Description of Artificial Sequence: Synthetic polypeptide
APELLGGPSVFLFPPKPKDTLYITREPEVTCVVVDVSHEDPEVKFNWYVDGVEVHNAKTKPREEQYNSTYRVVSVLTVLHQDWLNGKEYKCKVSNKALPAPIEKTISKAKGQPREPQVYTLPPSRDELTKNQVSLSCAVKGFYPSDIAVEWESNGQPENNYKTTPPVLDSDGSFFLVSKLTVDKSRWQQGNVFSCSVMHEALHNHYTQKSLSLSPGK

SEQ ID NO: 380 - protein, 217 aa, Artificial Sequence
  Description of Artificial Sequence: Synthetic polypeptide
APEAAGGPSVFLFPPKPKDTLYITREPEVTCVVVDVSHEDPEVKFNWYVDGVEVHNAKTKPREEQYNSTYRVVSVLTVLHQDWLNGKEYKCKVSNKALPAPIEKTISKAKGQPREPQVYTLPPSRDELTKNQVSLSCAVKGFYPSDIAVEWESNGQPENNYKTTPPVLDSDGSFFLVSKLTVDKSRWQQGNVFSCSVMHEALHNHYTQKSLSLSPGK

SEQ ID NO: 381 - protein, 217 aa, Artificial Sequence
  Description of Artificial Sequence: Synthetic polypeptide
APELLGGPSVFLFPPKPKDTLMISRTPEVTCVVVDVSHEDPEVKFNWYVDGVEVHNAKTKPREEQYNSTYRVVSVLTVLHQDWLNGKEYKCKVSNKALPAPIEKTISKAKGQPREPQVYTLPPSRDELTKNQVSLSCAVKGFYPSDIAVEWESNGQPENNYKTTPPVLDSDGSFFLVSKLTVDKSRWQQGNVFSCSVLHEALHSHYTQKSLSLSPGK

SEQ ID NO: 382 - protein, 217 aa, Artificial Sequence
  Description of Artificial Sequence: Synthetic polypeptide
APEAAGGPSVFLFPPKPKDTLMISRTPEVTCVVVDVSHEDPEVKFNWYVDGVEVHNAKTKPREEQYNSTYRVVSVLTVLHQDWLNGKEYKCKVSNKALPAPIEKTISKAKGQPREPQVYTLPPSRDELTKNQVSLSCAVKGFYPSDIAVEWESNGQPENNYKTTPPVLDSDGSFFLVSKLTVDKSRWQQGNVFSCSVLHEALHSHYTQKSLSLSPGK

SEQ ID NO: 383 - protein, 217 aa, Artificial Sequence
  Description of Artificial Sequence: Synthetic polypeptide
APELLGGPSVFLFPPKPKDTLMISRTPEVTCVVVDVSHEDPEVKFNWYVDGVEVHNAKTKPREEQYNSTYRVVSVLTVLHQDWLNGKEYKCKVSNKALPAPIEKTISKAKGQPREPQVYTLPPSRDELTKNQVSLWCLVKGFYPSDIAVEWESNGQPENNYKTTPPVLDSDGSFFLYSKLTVDKSRWQQGNVFSCSVMHEALHNHYTQKSLSLSPGK

SEQ ID NO: 384 - protein, 217 aa, Artificial Sequence
  Description of Artificial Sequence: Synthetic polypeptide
APEAAGGPSVFLFPPKPKDTLMISRTPEVTCVVVDVSHEDPEVKFNWYVDGVEVHNAKTKPREEQYNSTYRVVSVLTVLHQDWLNGKEYKCKVSNKALPAPIEKTISKAKGQPREPQVYTLPPSRDELTKNQVSLWCLVKGFYPSDIAVEWESNGQPENNYKTTPPVLDSDGSFFLYSKLTVDKSRWQQGNVFSCSVMHEALHNHYTQKSLSLSPGK

SEQ ID NO: 385 - protein, 217 aa, Artificial Sequence
  Description of Artificial Sequence: Synthetic polypeptide
APELLGGPSVFLFPPKPKDTLYITREPEVTCVVVDVSHEDPEVKFNWYVDGVEVHNAKTKPREEQYNSTYRVVSVLTVLHQDWLNGKEYKCKVSNKALPAPIEKTISKAKGQPREPQVYTLPPSRDELTKNQVSLWCLVKGFYPSDIAVEWESNGQPENNYKTTPPVLDSDGSFFLYSKLTVDKSRWQQGNVFSCSVMHEALHNHYTQKSLSLSPGK

SEQ ID NO: 386 - protein, 217 aa, Artificial Sequence
  Description of Artificial Sequence: Synthetic polypeptide
APEAAGGPSVFLFPPKPKDTLYITREPEVTCVVVDVSHEDPEVKFNWYVDGVEVHNAKTKPREEQYNSTYRVVSVLTVLHQDWLNGKEYKCKVSNKALPAPIEKTISKAKGQPREPQVYTLPPSRDELTKNQVSLWCLVKGFYPSDIAVEWESNGQPENNYKTTPPVLDSDGSFFLYSKLTVDKSRWQQGNVFSCSVMHEALHNHYTQKSLSLSPGK

SEQ ID NO: 387 - protein, 217 aa, Artificial Sequence
  Description of Artificial Sequence: Synthetic polypeptide
APELLGGPSVFLFPPKPKDTLMISRTPEVTCVVVDVSHEDPEVKFNWYVDGVEVHNAKTKPREEQYNSTYRVVSVLTVLHQDWLNGKEYKCKVSNKALPAPIEKTISKAKGQPREPQVYTLPPSRDELTKNQVSLWCLVKGFYPSDIAVEWESNGQPENNYKTTPPVLDSDGSFFLYSKLTVDKSRWQQGNVFSCSVLHEALHSHYTQKSLSLSPGK

SEQ ID NO: 388 - protein, 217 aa, Artificial Sequence
  Description of Artificial Sequence: Synthetic polypeptide
APEAAGGPSVFLFPPKPKDTLMISRTPEVTCVVVDVSHEDPEVKFNWYVDGVEVHNAKTKPREEQYNSTYRVVSVLTVLHQDWLNGKEYKCKVSNKALPAPIEKTISKAKGQPREPQVYTLPPSRDELTKNQVSLWCLVKGFYPSDIAVEWESNGQPENNYKTTPPVLDSDGSFFLYSKLTVDKSRWQQGNVFSCSVLHEALHSHYTQKSLSLSPGK

SEQ ID NO: 389 - protein, 14 aa, Artificial Sequence
  Description of Artificial Sequence: Synthetic peptide
GGGGSGGGGSGGGG

SEQ ID NO: 390 - protein, 19 aa, Artificial Sequence
  Description of Artificial Sequence: Synthetic peptide
RTVAGGGGSGGGGSGGGGS

SEQ ID NO: 391 - protein, 19 aa, Artificial Sequence
  Description of Artificial Sequence: Synthetic peptide
ASTKGGGGSGGGGSGGGGS

SEQ ID NO: 392 - protein, 184 aa, Homo sapiens
AQNSVIIVDKNGRLVYLVENPGGYVAYSKAATVTGKLVHANFGTKKDFEDLYTPVNGSIVIVRAGKITFAEKVANAESLNAIGVLIYMDQTKFPIVNAELSFFGHAHLGTGDPYTPGFPSFNHTQFPPSRSSGLPNIPVQTISRAAAEKLFGNMEGDCPSDWKTDSTCRMVTSESKNVKLTVSN

SEQ ID NO: 393 - protein, 184 aa, Macaca mulatta
AQNSVIIVDKNGGLVYLVENPGGYVAYSKAATVTGKLVHANFGTKKDFEDLDSPVNGSIVIVRAGKITFAEKVANAESLNAIGVLIYMDQTKFPIVKADLSFFGHAHLGTGDPYTPGFPSFNHTQFPPSQSSGLPNIPVQTISRAAAEKLFGNMEGDCPSDWKTDSTCKMVTSENKSVKLTVSN

SEQ ID NO: 394 - protein, 184 aa, Pan troglodytes
AQNSVIIVDKNGSLVYLVENPGGYVAYSKAATVTGKLVHANFGTKKDFEDLHTPVNGSIVIVRAGKITFAEKVANAESLNAIGVLIYMDQTKFPIVNAELSFFGHAHLGTGDPYTPGFPSFNHTQFPPSRSSGLPNIPVQTVSRAAAEKLFGNMEGDCPSDWKTDSTCRMVTSESKNVKLTVSN

SEQ ID NO: 395 - protein, 184 aa, Macaca fascicularis; identical to SEQ ID NO: 393

SEQ ID NO: 396 - protein, 763 aa, Artificial Sequence
  Description of Artificial Sequence: Synthetic polypeptide
MMDQARSAFSNLFGGEPLSYTRFSLARQVDGDNSHVEMKLAADEEENADNNMKASVRKPKRFNGRLCFAAIALVIFFLIGFMSGYLGYCKRVEQKEECVKLAETEETDKSETMETEDVPTSSRLYWADLKTLLSEKLNSIEFADTIKQLSQNTYTPREAGSQKDESLAYYIENQFHEFKFSKVWRDEHYVKIQVKSSAQNSVIIVDKNGRLVYLVENPGGYVAYSKAATVTGKLVHANFGTKKDFEDLYTPVNGSIVIVRAGKITFAEKVANAESLNAIGVLIYMDQTKFPIVNAELSFFGHAHLGTGDPYTPGFPSFNHTQFPPSRSSGLPNIPVQTISRAAAEKLFGNMEGDCPSDWKTDSTCRMVTSESKNVKLTVSNVLKERRILNIFGVIKGYEEPDRYVVVGAQRDALGAGVAAKSSVGTGLLLKLAQVFSDMISKDGFRPSRSIIFASWTAGDFGAVGATEWLEGYLSSLHLKAFTYINLDKVVLGTSNFKVSASPLLYTLMGKIMQDVKHPVDGKSLYRDSNWISKVEKLSFDNAAYPFLAYSGIPAVSFCFCEDADYPYLGTRLDTYEALTQKVPQLNQMVRTAAEVAGQLIIKLTHDVELNLDYEMYNSKLLSFMKDLNQFKTDIRDMGLSLQWLYSARGDYFRATSRLTTDFHNAEKTNRFVMREINDRIMKVEYHFLSPYVSPRESPFRHIFWGSGSHTLSALVENLKLRQKNITAFNETLFRNQLALATWTIQGVANALSGDIWNIDNEF

SEQ ID NO: 397 - protein, 552 aa, Homo sapiens
GCTCAGAACTCCGTGATCATCGTGGATAAGAACGGCCGGCTGGTGTACCTGGTGGAGAACCCTGGCGGATACGTGGCTTACTCTAAGGCCGCTACCGTGACAGGCAAGCTGGTGCACGCCAACTTCGGAACCAAGAAGGACTTTGAGGATCTGTACACACCAGTGAACGGCTCTATCGTGATCGTGCGCGCTGGAAAGATCACCTTCGCCGAGAAGGTGGCTAACGCCGAGAGCCTGAACGCCATCGGCGTGCTGATCTACATGGATCAGACAAAGTTTCCCATCGTGAACGCTGAGCTGTCTTTCTTTGGACACGCTCACCTGGGCACCGGAGACCCATACACACCCGGATTCCCTAGCTTTAACCACACCCAGTTCCCCCCTTCCAGGTCTAGCGGACTGCCAAACATCCCCGTGCAGACAATCAGCAGAGCCGCTGCCGAGAAGCTGTTTGGCAACATGGAGGGAGACTGCCCCTCCGATTGGAAGACCGACTCTACATGTAGGATGGTGACCTCCGAGTCAAAAAATGTCAAACTCACCGTGTCCAAT

SEQ ID NO: 398 - protein, 412 aa, Homo sapiens
MAEPRQEFEVMEDHAGTYGLGDRKDQGGYTMHQDQEGDTDAGLKESPLQTPTEDGSEEPGSETSDAKSTPTAEAEEAGIGDTPSLEDEAAGHVTQARMVSKSKDGTGSDDKKAKGADGKTKIATPRGAAPPGQKGQANATRIPAKTPPAPKTPPSSGEPPKSGDRSGYSSPGSPGTPGSRSRTPSLPTPPTREPKKVAVVRTPPKSPSSAKSRLQTAPVPMPDLKNVKSKIGSTENLKHQPGGGKVQIINKKLDLSNVQSKCGSKDNIKHVPGGGSVQIVYKPVDLSKVTSKCGSLGNIHHKPGGGQVEVKSEKLDFKDRVQSKIGSLDNITHVPGGGNKKIETHKLTFRENAKAKTDHGAEIVYKSPVVSGDTSPRHLSNVSSTGSIDMVDSPQLATLADEVSASLAKQGL

SEQ ID NO: 399 - protein, 5 aa, Artificial Sequence
  Description of Artificial Sequence: Synthetic peptide
  MOD_RES (4)..(4): Any amino acid
VPPXM

SEQ ID NO: 400 - protein, 4 aa, Artificial Sequence
  Description of Artificial Sequence: Synthetic peptide
SLTS

SEQ ID NO: 401 - protein, 14 aa, Artificial Sequence
  Description of Artificial Sequence: Synthetic peptide
RTVAGGGGSGGGGS

SEQ ID NO: 402 - protein, 14 aa, Artificial Sequence
  Description of Artificial Sequence: Synthetic peptide
ASTKGGGGSGGGGS

SEQ ID NO: 403 - protein, 8 aa, Homo sapiens
EVHNAKTK

SEQ ID NO: 404 - protein, 8 aa, Artificial Sequence
  Description of Artificial Sequence: Synthetic peptide
DVRYEWQL

SEQ ID NO: 405 - protein, 8 aa, Artificial Sequence
  Description of Artificial Sequence: Synthetic peptide
PVSWEWYW

SEQ ID NO: 406 - protein, 8 aa, Artificial Sequence
  Description of Artificial Sequence: Synthetic peptide
MVRREWHR

SEQ ID NO: 407 - protein, 8 aa, Artificial Sequence
  Description of Artificial Sequence: Synthetic peptide
PVRWEWQW

SEQ ID NO: 408 - protein, 8 aa, Artificial Sequence
  Description of Artificial Sequence: Synthetic peptide
PVRWEWQN

SEQ ID NO: 409 - protein, 8 aa, Artificial Sequence
  Description of Artificial Sequence: Synthetic peptide
LVRREWHR

SEQ ID NO: 410 - protein, 8 aa, Artificial Sequence
  Description of Artificial Sequence: Synthetic peptide
AVRWEWIR

SEQ ID NO: 411 - protein, 8 aa, Artificial Sequence
  Description of Artificial Sequence: Synthetic peptide
EVAWEWFW

SEQ ID NO: 412 - protein, 8 aa, Artificial Sequence
  Description of Artificial Sequence: Synthetic peptide
NVRVEWQY

SEQ ID NO: 413 - protein, 8 aa, Artificial Sequence
  Description of Artificial Sequence: Synthetic peptide
EVRREWVR

SEQ ID NO: 414 - protein, 8 aa, Artificial Sequence
  Description of Artificial Sequence: Synthetic peptide
LVRREWQR

SEQ ID NO: 415 - protein, 8 aa, Artificial Sequence
  Description of Artificial Sequence: Synthetic peptide
DVRYEWYY

SEQ ID NO: 416 - protein, 8 aa, Artificial Sequence
  Description of Artificial Sequence: Synthetic peptide
DVRYEWVR

SEQ ID NO: 417 - protein, 8 aa, Artificial Sequence
  Description of Artificial Sequence: Synthetic peptide
NVRREWHR

SEQ ID NO: 418 - protein, 8 aa, Artificial Sequence
  Description of Artificial Sequence: Synthetic peptide
FVGVAYDV

SEQ ID NO: 419 - protein, 6 aa, Homo sapiens
VSHEDP

SEQ ID NO: 420 - protein, 6 aa, Artificial Sequence
  Description of Artificial Sequence: Synthetic peptide
PQTPPW

SEQ ID NO: 421 - protein, 6 aa, Artificial Sequence
  Description of Artificial Sequence: Synthetic peptide
PPSPPW

SEQ ID NO: 422 - protein, 6 aa, Artificial Sequence
  Description of Artificial Sequence: Synthetic peptide
FRGPPW

SEQ ID NO: 423 - protein, 6 aa, Artificial Sequence
  Description of Artificial Sequence: Synthetic peptide
PQTVPW

SEQ ID NO: 424 - protein, 6 aa, Artificial Sequence
  Description of Artificial Sequence: Synthetic peptide
PKMPPW

SEQ ID NO: 425 - protein, 6 aa, Artificial Sequence
  Description of Artificial Sequence: Synthetic peptide
PPVPPW

SEQ ID NO: 426 - protein, 6 aa, Artificial Sequence
  Description of Artificial Sequence: Synthetic peptide
PAFPPW

SEQ ID NO: 427 - protein, 6 aa, Artificial Sequence
  Description of Artificial Sequence: Synthetic peptide
AIWPPW

SEQ ID NO: 428 - protein, 6 aa, Artificial Sequence
  Description of Artificial Sequence: Synthetic peptide
PPVAPW

SEQ ID NO: 429 - protein, 6 aa, Artificial Sequence
  Description of Artificial Sequence: Synthetic peptide
PQMPPQ

SEQ ID NO: 430 - protein, 6 aa, Artificial Sequence
  Description of Artificial Sequence: Synthetic peptide
PQTAPW

SEQ ID NO: 431 - protein, 6 aa, Artificial Sequence
  Description of Artificial Sequence: Synthetic peptide
PQTPPQ

SEQ ID NO: 432 - protein, 6 aa, Artificial Sequence
  Description of Artificial Sequence: Synthetic peptide
PRVPPW

SEQ ID NO: 433 - protein, 6 aa, Artificial Sequence
  Description of Artificial Sequence: Synthetic peptide
PSVPPW

SEQ ID NO: 434 - protein, 6 aa, Artificial Sequence
  Description of Artificial Sequence: Synthetic peptide
MLWPVP

SEQ ID NO: 435 - protein, 6 aa, Artificial Sequence
  Description of Artificial Sequence: Synthetic peptide
MEWPVT

SEQ ID NO: 436 - protein, 6 aa, Artificial Sequence
  Description of Artificial Sequence: Synthetic peptide
DDLTFQ

SEQ ID NO: 437 - protein, 6 aa, Artificial Sequence
  Description of Artificial Sequence: Synthetic peptide
AYGDPE

SEQ ID NO: 438 - protein, 5 aa, Homo sapiens
QYNST

SEQ ID NO: 439 - protein, 5 aa, Artificial Sequence
  Description of Artificial Sequence: Synthetic peptide
EYYTY

SEQ ID NO: 440 - protein, 5 aa, Artificial Sequence
  Description of Artificial Sequence: Synthetic peptide
EYYSN

SEQ ID NO: 441 - protein, 5 aa, Artificial Sequence
  Description of Artificial Sequence: Synthetic peptide
EYYHD

SEQ ID NO: 442 - protein, 5 aa, Artificial Sequence
  Description of Artificial Sequence: Synthetic peptide
EYYQN

SEQ ID NO: 443 - protein, 5 aa, Artificial Sequence
  Description of Artificial Sequence: Synthetic peptide
EYYSS

SEQ ID NO: 444 - protein, 5 aa, Artificial Sequence
  Description of Artificial Sequence: Synthetic peptide
VYHRP

SEQ ID NO: 445 - protein, 5 aa, Artificial Sequence
  Description of Artificial Sequence: Synthetic peptide
TYHNP

SEQ ID NO: 446 - protein, 5 aa, Artificial Sequence
  Description of Artificial Sequence: Synthetic peptide
TYHHP

SEQ ID NO: 447 - protein, 5 aa, Artificial Sequence
  Description of Artificial Sequence: Synthetic peptide
VYVTP

SEQ ID NO: 448 - protein, 5 aa, Artificial Sequence
  Description of Artificial Sequence: Synthetic peptide
LYVTP

SEQ ID NO: 449 - protein, 5 aa, Artificial Sequence
  Description of Artificial Sequence: Synthetic peptide
WYDVP

SEQ ID NO: 450 - protein, 5 aa, Homo sapiens
HEDPE

SEQ ID NO: 451 - protein, 5 aa, Artificial Sequence
  Description of Artificial Sequence: Synthetic peptide
VPPRM

SEQ ID NO: 452 - protein, 5 aa, Artificial Sequence
  Description of Artificial Sequence: Synthetic peptide
VPPWM

SEQ ID NO: 453 - protein, 5 aa, Artificial Sequence
  Description of Artificial Sequence: Synthetic peptide
DMWEY

SEQ ID NO: 454 - protein, 5 aa, Artificial Sequence
  Description of Artificial Sequence: Synthetic peptide
DDWTW

SEQ ID NO: 455 - protein, 5 aa, Artificial Sequence
  Description of Artificial Sequence: Synthetic peptide
DDWEW

SEQ ID NO: 456 - protein, 9 aa, Homo sapiens
REEQYNSTY

SEQ ID NO: 457 - protein, 9 aa, Artificial Sequence
  Description of Artificial Sequence: Synthetic peptide
LTSQHNSTV

SEQ ID NO: 458 - protein, 9 aa, Artificial Sequence
  Description of Artificial Sequence: Synthetic peptide
WVKQLNSTW

SEQ ID NO: 459 - protein, 9 aa, Artificial Sequence
  Description of Artificial Sequence: Synthetic peptide
WIAQPNSTW

SEQ ID NO: 460 - protein, 9 aa, Artificial Sequence
  Description of Artificial Sequence: Synthetic peptide
WKLQLNSTW

SEQ ID NO: 461 - protein, 5 aa, Homo sapiens
EVKFN

SEQ ID NO: 462 - protein, 5 aa, Artificial Sequence
  Description of Artificial Sequence: Synthetic peptide
WVWFY

SEQ ID NO: 463 - protein, 5 aa, Artificial Sequence
  Description of Artificial Sequence: Synthetic peptide
VVGFR

SEQ ID NO: 464 - protein, 5 aa, Artificial Sequence
  Description of Artificial Sequence: Synthetic peptide
IVGFR

SEQ ID NO: 465 - protein, 5 aa, Artificial Sequence
  Description of Artificial Sequence: Synthetic peptide
AVGFE

SEQ ID NO: 466 - protein, 10 aa, Homo sapiens
KVSNKALPAP

SEQ ID NO: 467 - protein, 10 aa, Artificial Sequence
  Description of Artificial Sequence: Synthetic peptide
SVVNIALWWS

SEQ ID NO: 468 - protein, 10 aa, Artificial Sequence
  Description of Artificial Sequence: Synthetic peptide
RVSNSALTWK

SEQ ID NO: 469 - protein, 10 aa, Artificial Sequence
  Description of Artificial Sequence: Synthetic peptide
RVSNSALSWR

SEQ ID NO: 470 - protein, 10 aa, Artificial Sequence
  Description of Artificial Sequence: Synthetic peptide
RVSNSALRWR

SEQ ID NO: 471 - protein, 10 aa, Artificial Sequence
  Description of Artificial Sequence: Synthetic peptide
QVFNWALDWV

SEQ ID NO: 472 - protein, 5 aa, Homo sapiens
EPQVY

SEQ ID NO: 473 - protein, 5 aa, Artificial Sequence
  Description of Artificial Sequence: Synthetic peptide
FDYVT

SEQ ID NO: 474 - protein, 5 aa, Artificial Sequence
  Description of Artificial Sequence: Synthetic peptide
FDMVT

SEQ ID NO: 475 - protein, 5 aa, Artificial Sequence
  Description of Artificial Sequence: Synthetic peptide
FEYVT

SEQ ID NO: 476 - protein, 5 aa, Artificial Sequence
  Description of Artificial Sequence: Synthetic peptide
FEMVT

SEQ ID NO: 477 - protein, 5 aa, Artificial Sequence
  Description of Artificial Sequence: Synthetic peptide
FELVT

SEQ ID NO: 478 - protein, 5 aa, Artificial Sequence
  Description of Artificial Sequence: Synthetic peptide
FEIVT

SEQ ID NO: 479 - protein, 5 aa, Artificial Sequence
  Description of Artificial Sequence: Synthetic peptide
FDIVT

SEQ ID NO: 480 - protein, 5 aa, Artificial Sequence
  Description of Artificial Sequence: Synthetic peptide
FGMVT

SEQ ID NO: 481 - protein, 5 aa, Artificial Sequence
  Description of Artificial Sequence: Synthetic peptide
FADVT

SEQ ID NO: 482 - protein, 5 aa, Artificial Sequence
  Description of Artificial Sequence: Synthetic peptide
FGLVT

SEQ ID NO: 483 - protein, 5 aa, Artificial Sequence
  Description of Artificial Sequence: Synthetic peptide
IDYVT

SEQ ID NO: 484 - protein, 5 aa, Artificial Sequence
  Description of Artificial Sequence: Synthetic peptide
FKDVT

SEQ ID NO: 485 - protein, 5 aa, Artificial Sequence
  Description of Artificial Sequence: Synthetic peptide
FDLVT

SEQ ID NO: 486 - protein, 5 aa, Artificial Sequence
  Description of Artificial Sequence: Synthetic peptide
FELVA

SEQ ID NO: 487 - protein, 4 aa, Homo sapiens
TQKS

SEQ ID NO: 488 - protein, 4 aa, Artificial Sequence
  Description of Artificial Sequence: Synthetic peptide
GFHD

SEQ ID NO: 489 - protein, 4 aa, Artificial Sequence
  Description of Artificial Sequence: Synthetic peptide
GFYD

SEQ ID NO: 490 - protein, 4 aa, Artificial Sequence
  Description of Artificial Sequence: Synthetic peptide
GFSD

SEQ ID NO: 491 - protein, 4 aa, Artificial Sequence
  Description of Artificial Sequence: Synthetic peptide
GFFD

SEQ ID NO: 492 - protein, 8 aa, Homo sapiens
NGQPENNY

SEQ ID NO: 493 - protein, 8 aa, Artificial Sequence
  Description of Artificial Sequence: Synthetic peptide
LGLVWVGY

SEQ ID NO: 494 - protein, 8 aa, Artificial Sequence
  Description of Artificial Sequence: Synthetic peptide
YGTVWSHY

SEQ ID NO: 495 - protein, 8 aa, Artificial Sequence
  Description of Artificial Sequence: Synthetic peptide
YGTEWSQY

SEQ ID NO: 496 - protein, 8 aa, Artificial Sequence
  Description of Artificial Sequence: Synthetic peptide
VGTPWALY

SEQ ID NO: 497 - protein, 8 aa, Artificial Sequence
  Description of Artificial Sequence: Synthetic peptide
YGTVWSKY

SEQ ID NO: 498 - protein, 8 aa, Artificial Sequence
  Description of Artificial Sequence: Synthetic peptide
LGHVWAVY

SEQ ID NO: 499 - protein, 8 aa, Artificial Sequence
  Description of Artificial Sequence: Synthetic peptide
MGHVWVGY

SEQ ID NO: 500 - protein, 8 aa, Artificial Sequence
  Description of Artificial Sequence: Synthetic peptide
LGLVWVFS

SEQ ID NO: 501 - protein, 8 aa, Artificial Sequence
  Description of Artificial Sequence: Synthetic peptide
YGTEWSSY

SEQ ID NO: 502 - protein, 8 aa, Artificial Sequence
  Description of Artificial Sequence: Synthetic peptide
YGTEWSNY

SEQ ID NO: 503 - protein, 8 aa, Artificial Sequence
  Description of Artificial Sequence: Synthetic peptide
LGHVWVGY

SEQ ID NO: 504 - protein, 8 aa, Artificial Sequence
  Description of Artificial Sequence: Synthetic peptide
LGHVWVAT

SEQ ID NO: 505 - protein, 8 aa, Artificial Sequence
  Description of Artificial Sequence: Synthetic peptide
LGPVWVHT

SEQ ID NO: 506 - protein, 8 aa, Artificial Sequence
  Description of Artificial Sequence: Synthetic peptide
LGHVWVDQ

SEQ ID NO: 507 - protein, 8 aa, Artificial Sequence
  Description of Artificial Sequence: Synthetic peptide
LGHVWVNQ

SEQ ID NO: 508 - protein, 8 aa, Artificial Sequence
  Description of Artificial Sequence: Synthetic peptide
LGHVWVNF

SEQ ID NO: 509 - protein, 8 aa, Artificial Sequence
  Description of Artificial Sequence: Synthetic peptide
WGFVWSTY

SEQ ID NO: 510 - protein, 8 aa, Artificial Sequence
  Description of Artificial Sequence: Synthetic peptide
WGHVWSTY

SEQ ID NO: 511 - protein, 8 aa, Artificial Sequence
  Description of Artificial Sequence: Synthetic peptide
LGHVWVEQ

SEQ ID NO: 512 - protein, 8 aa, Artificial Sequence
  Description of Artificial Sequence: Synthetic peptide
LGHVWVGV

SEQ ID NO: 513 - protein, 8 aa, Artificial Sequence
  Description of Artificial Sequence: Synthetic peptide
LGHVWVHT

SEQ ID NO: 514 - protein, 8 aa, Artificial Sequence
  Description of Artificial Sequence: Synthetic peptide
WGTVWGTY

SEQ ID NO: 515 - protein, 8 aa, Artificial Sequence
  Description of Artificial Sequence: Synthetic peptide
LGHVWVGT

SEQ ID NO: 516 - protein, 9 aa, Homo sapiens
DKSRWQQGN

SEQ ID NO: 517 - protein, 9 aa, Artificial Sequence
  Description of Artificial Sequence: Synthetic peptide
AKSTWQQGW

SEQ ID NO: 518 - protein, 9 aa, Artificial Sequence
  Description of Artificial Sequence: Synthetic peptide
SKSEWQQGY

SEQ ID NO: 519 - protein, 9 aa, Artificial Sequence
  Description of Artificial Sequence: Synthetic peptide
EKSDWQQGH

SEQ ID NO: 520 - protein, 9 aa, Artificial Sequence
  Description of Artificial Sequence: Synthetic peptide
LKSEWQQGW

SEQ ID NO: 521 - protein, 9 aa, Artificial Sequence
  Description of Artificial Sequence: Synthetic peptide
SKSEWQQGF

SEQ ID NO: 522 - protein, 9 aa, Artificial Sequence
  Description of Artificial Sequence: Synthetic peptide
PKSTWQQGW

SEQ ID NO: 523 - protein, 9 aa, Artificial Sequence
  Description of Artificial Sequence: Synthetic peptide
DKSTWQQGW

SEQ ID NO: 524 - protein, 9 aa, Artificial Sequence
  Description of Artificial Sequence: Synthetic peptide
TKSEWQQGF

SEQ ID NO: 525 - protein, 9 aa, Artificial Sequence
  Description of Artificial Sequence: Synthetic peptide
SKSEWQQGW

SEQ ID NO: 526 - protein, 9 aa, Artificial Sequence
  Description of Artificial Sequence: Synthetic peptide
PKSNWQQGF

SEQ ID NO: 527 - protein, 9 aa, Artificial Sequence
  Description of Artificial Sequence: Synthetic peptide
PKSNWQQGY

SEQ ID NO: 528 - protein, 12 aa, Artificial Sequence
  Description of Artificial Sequence: Synthetic peptide
  MOD_RES (4)..(4): Any amino acid
  MOD_RES (6)..(10): Any amino acid
WESXGXXXXXYK

SEQ ID NO: 529 - protein, 12 aa, Artificial Sequence
  Description of Artificial Sequence: Synthetic peptide
  MOD_RES (3)..(3): Any amino acid
  MOD_RES (6)..(6): Any amino acid
  MOD_RES (11)..(11): Any amino acid
TVXKSXWQQGXV

SEQ ID NO: 530 - protein, 5 aa, Artificial Sequence
  Description of Artificial Sequence: Synthetic peptide
  MOD_RES (2)..(2): Any amino acid
  MOD_RES (5)..(5): Any amino acid
TXWSX

SEQ ID NO: 531 - protein, 5 aa, Artificial Sequence
  Description of Artificial Sequence: Synthetic peptide
YGTEW

SEQ ID NO: 532 - protein, 7 aa, Artificial Sequence
  Description of Artificial Sequence: Synthetic peptide
  MOD_RES (2)..(2): Any amino acid
YXTEWSS

SEQ ID NO: 533 - protein, 15 aa, Homo sapiens
AVEWESNGQPENNYK

SEQ ID NO: 534 - protein, 15 aa, Artificial Sequence
  Description of Artificial Sequence: Synthetic peptide
AVEWESFGTEWSSYK

SEQ ID NO: 535 - protein, 15 aa, Artificial Sequence
  Description of Artificial Sequence: Synthetic peptide
AVEWESYGTEWASYK

SEQ ID NO: 536 - protein, 15 aa, Artificial Sequence
  Description of Artificial Sequence: Synthetic peptide
AVEWESYGTEWVSYK

SEQ ID NO: 537 - protein, 15 aa, Artificial Sequence
  Description of Artificial Sequence: Synthetic peptide
AVEWESYGTEWSSYK

SEQ ID NO: 538 - protein, 15 aa, Artificial Sequence
  Description of Artificial Sequence: Synthetic peptide
AVEWESFGTEWASYK

SEQ ID NO: 539 - protein, 15 aa, Artificial Sequence
  Description of Artificial Sequence: Synthetic peptide
AVEWESFGTEWVSYK

SEQ ID NO: 540 - protein, 15 aa, Artificial Sequence
  Description of Artificial Sequence: Synthetic peptide
AVWWESFGTEWSSYK

SEQ ID NO: 541 - protein, 15 aa, Artificial Sequence
  Description of Artificial Sequence: Synthetic peptide
AVWWESYGTEWASYK

SEQ ID NO: 542 - protein, 15 aa, Artificial Sequence
  Description of Artificial Sequence: Synthetic peptide
AVWWESYGTEWVSYK

SEQ ID NO: 543 - protein, 15 aa, Artificial Sequence
  Description of Artificial Sequence: Synthetic peptide
AVWWESYGTEWSSYK

SEQ ID NO: 544 - protein, 15 aa, Artificial Sequence
  Description of Artificial Sequence: Synthetic peptide
AVWWESFGTEWASYK

SEQ ID NO: 545 - protein, 15 aa, Artificial Sequence
  Description of Artificial Sequence: Synthetic peptide
AVWWESFGTEWVSYK

SEQ ID NO: 546 - protein, 15 aa, Artificial Sequence
  Description of Artificial Sequence: Synthetic peptide
AVEWESFGTEWSNYK

SEQ ID NO: 547 - protein, 15 aa, Artificial Sequence
  Description of Artificial Sequence: Synthetic peptide
AVEWESYGTEWANYK

SEQ ID NO: 548 - protein, 15 aa, Artificial Sequence
  Description of Artificial Sequence: Synthetic peptide
AVEWESYGTEWVNYK

SEQ ID NO: 549 - protein, 15 aa, Artificial Sequence
  Description of Artificial Sequence: Synthetic peptide
AVEWESYGTEWSNYK

SEQ ID NO: 550 - protein, 15 aa, Artificial Sequence
  Description of Artificial Sequence: Synthetic peptide
AVEWESFGTEWANYK

SEQ ID NO: 551 - protein, 15 aa, Artificial Sequence
  Description of Artificial Sequence: Synthetic peptide
AVEWESFGTEWVNYK

SEQ ID NO: 552 - protein, 15 aa, Artificial Sequence
  Description of Artificial Sequence: Synthetic peptide
AVWWESFGTEWSNYK

SEQ ID NO: 553 - protein, 15 aa, Artificial Sequence
  Description of Artificial Sequence: Synthetic peptide
AVWWESYGTEWANYK

SEQ ID NO: 554 - protein, 15 aa, Artificial Sequence
  Description of Artificial Sequence: Synthetic peptide
AVWWESYGTEWVNYK

SEQ ID NO: 555 - protein, 15 aa, Artificial Sequence
  Description of Artificial Sequence: Synthetic peptide
AVWWESYGTEWSNYK

SEQ ID NO: 556 - protein, 15 aa, Artificial Sequence
  Description of Artificial Sequence: Synthetic peptide
AVWWESFGTEWANYK

SEQ ID NO: 557 - protein, 15 aa, Artificial Sequence
  Description of Artificial Sequence: Synthetic peptide
AVWWESFGTEWVNYK

SEQ ID NO: 558 - protein, 15 aa, Artificial Sequence
  Description of Artificial Sequence: Synthetic peptide
AVLWESFGTEWSSYK

SEQ ID NO: 559 - protein, 15 aa, Artificial Sequence
  Description of Artificial Sequence: Synthetic peptide
AVLWESYGTEWASYK

SEQ ID NO: 560 - protein, 15 aa, Artificial Sequence
  Description of Artificial Sequence: Synthetic peptide
AVLWESYGTEWVSYK

SEQ ID NO: 561 - protein, 15 aa, Artificial Sequence
  Description of Artificial Sequence: Synthetic peptide
AVLWESYGTEWSSYK

SEQ ID NO: 562 - protein, 15 aa, Artificial Sequence
  Description of Artificial Sequence: Synthetic peptide
AVLWESFGTEWASYK

SEQ ID NO: 563 - protein, 15 aa, Artificial Sequence
  Description of Artificial Sequence: Synthetic peptide
AVLWESFGTEWVSYK

SEQ ID NO: 564 - protein, 13 aa, Homo sapiens
TVDKSRWQQGNVF

SEQ ID NO: 565 - protein, 13 aa, Artificial Sequence
  Description of Artificial Sequence: Synthetic peptide
TVTKEEWQQGFVF

SEQ ID NO: 566 - protein, 13 aa, Artificial Sequence
  Description of Artificial Sequence: Synthetic peptide
TVSKEEWQQGFVF

SEQ ID NO: 567 - protein, 13 aa, Artificial Sequence
  Description of Artificial Sequence: Synthetic peptide
TVTKSEWQQGFVF

SEQ ID NO: 568 - protein, 13 aa, Artificial Sequence
  Description of Artificial Sequence: Synthetic peptide
TVSKSEWQQGFVF

SEQ ID NO: 569 - protein, 5 aa, Homo sapiens
QPENN

SEQ ID NO: 570 - protein, 5 aa, Artificial Sequence
  Description of Artificial Sequence: Synthetic peptide
TEWSS

SEQ ID NO: 571 - protein, 19 aa, Artificial Sequence
  Description of Artificial Sequence: Synthetic peptide
GGGGSGGGGSGGGGSGGGG

SEQ ID NO: 572 - protein, 9 aa, Artificial Sequence
  Description of Artificial Sequence: Synthetic peptide
GGGGSGGGG

SEQ ID NO: 573 - protein, 10 aa, Artificial Sequence
  Description of Artificial Sequence: Synthetic peptide
  MISC_FEATURE (1)..(10): This sequence may encompass 1-2 "Gly Gly Gly Gly Ser" repeating units
GGGGSGGGGS

SEQ ID NO: 574 - protein, 15 aa, Artificial Sequence
  Description of Artificial Sequence: Synthetic peptide
  MISC_FEATURE (1)..(15): This sequence may encompass 1-3 "Gly Gly Gly Gly Ser" repeating units
GGGGSGGGGSGGGGS

SEQ ID NO: 575 - protein, 6 aa, Artificial Sequence
  Description of Artificial Sequence: Synthetic 6xHis tag
HHHHHH

1. A protein comprising:
(a) a first Fc polypeptide that is fused at the N-terminus to an Fd portion of a Fab that specifically binds to a first antigen;
(b) a second Fc polypeptide that is fused at the N-terminus to a single-chain variable fragment (scFv) that specifically binds to a second antigen, wherein the first and second Fc polypeptides form an Fc dimer; and
(c) a light chain polypeptide that pairs with the Fd portion to form the Fab that specifically binds to the first antigen;
wherein the first Fc polypeptide and/or the second Fc polypeptide comprises a modified CH3 domain and specifically binds to a transferrin receptor.

2. The protein of claim 1, wherein the first antigen and the second antigen are the same antigen.

3. The protein of claim 1, wherein the first antigen and the second antigen are different antigens.

4. The protein of claim 1, wherein the second Fc polypeptide is fused to the scFv via a first linker.

5. The protein of claim 4, wherein the first linker has a length from 1 to 20 amino acids.

6. The protein of claim 4, wherein the first linker comprises a GGGGS (SEQ ID NO:371; G₄S) linker, a GGGGSGGGGS (SEQ ID NO:372; (G₄S)₂) linker, a GGGGSGGGGSGGGGS (SEQ ID NO:373; (G₄S)₃) linker, or a GGGGSGGGGSGGGG (SEQ ID NO:389; (G₄S)₂-G₄) linker.

7. The protein of claim 1, wherein the scFv comprises a VL region and a VH region that are connected via a second linker, wherein the orientation of the scFv is VL region-second linker-VH region.

8. The protein of claim 1, wherein the scFv comprises a VL region and a VH region that are connected via a second linker, wherein the orientation of the scFv is VH region-second linker-VL region.

9. The protein of claim 7, wherein the second linker has a length from 10 to 25 amino acids.

10. The protein of claim 7, wherein the second linker comprises a GGGGSGGGGSGGGGS (SEQ ID NO:373; (G₄S)₃) linker, a RTVAGGGGSGGGGS (SEQ ID NO:401; RTVA(G₄S)₂) linker, a RTVAGGGGSGGGGSGGGGS (SEQ ID NO:374; RTVA(G₄S)₃) linker, a ASTKGGGGSGGGGS (SEQ ID NO:402; ASTK(G₄S)₂) linker, or a ASTKGGGGSGGGGSGGGGS (SEQ ID NO:375; ASTK(G₄S)₃) linker.

11. The protein of claim 1, wherein the scFv comprises an interchain disulfide bridge.

12. The protein of claim 1, wherein the scFv comprises a cysteine at each of positions VH44 and VL100, according to Kabat variable domain numbering.

13. The protein of claim 12, wherein the scFv comprises a disulfide bond between the cysteines at positions VH44 and VL100.

14-40. (canceled)

41. The protein of claim 1, wherein the first Fc polypeptide comprises a modified CH3 domain and specifically binds to a transferrin receptor.

42. The protein of claim 1, wherein the second Fc polypeptide comprises a modified CH3 domain and specifically binds to a transferrin receptor.

43. (canceled)

44. The protein of claim 1, wherein the first Fc polypeptide and/or the second Fc polypeptide comprises a modified CH3 domain that comprises one, two, three, four, five, six, seven, eight, nine, ten, or eleven substitutions in a set of amino acid positions comprising 380, 384, 386, 387, 388, 389, 390, 413, 415, 416, and 421, according to EU numbering.

45. The protein of claim 44, wherein the modified CH3 domain comprises Glu, Leu, Ser, Val, Trp, Tyr, or Gln at position 380; Leu, Tyr, Phe, Trp, Met, Pro, or Val at position 384; Leu, Thr, His, Pro, Asn, Val, or Phe at position 386; Val, Pro, Ile, or an acidic amino acid at position 387; Trp at position 388; an aliphatic amino acid, Gly, Ser, Thr, or Asn at position 389; Gly, His, Gln, Leu, Lys, Val, Phe, Ser, Ala, Asp, Glu, Asn, Arg, or Thr at position 390; an acidic amino acid, Ala, Ser, Leu, Thr, Pro, Ile, or His at position 413; Glu, Ser, Asp, Gly, Thr, Pro, Gln, or Arg at position 415; Thr, Arg, Asn, or an acidic amino acid at position 416; and/or an aromatic amino acid, His, or Lys at position 421, according to EU numbering.

46-53. (canceled)

54. The protein of claim 53, wherein the first Fc polypeptide and/or the second Fc polypeptide comprises 1, 2, 3, 4, 5, 6, 7, 8, 9, 10, or 11 positions selected from the following: position 380 is Trp, Leu, or Glu; position 384 is Tyr or Phe; position 386 is Thr; position 387 is Glu; position 388 is Trp; position 389 is Ser, Ala, Val, or Asn; position 390 is Ser or Asn; position 413 is Thr or Ser; position 415 is Glu or Ser; position 416 is Glu; and position 421 is Phe.

55. (canceled)

56. The protein of claim 54, wherein the first Fc polypeptide and/or the second Fc polypeptide has a CH3 domain with at least 85% identity, at least 90% identity, or at least 95% identity to amino acids 111-217 of any one of SEQ ID NOs:4-29, 101-164, and 239-252.

57. The protein of claim 56, wherein the first Fc polypeptide and/or the second Fc polypeptide comprises the amino acid sequence of any one of SEQ ID NOs:4-29, 101-164, and 239-252.

58. The protein of claim 56, wherein the residues for at least 5, 6, 7, 8, 9, 10, 11, 12, 13, 14, 15, or 16 of the positions corresponding to EU index positions 380, 384, 386, 387, 388, 389, 390, 391, 392, 413, 414, 415, 416, 421, 424 and 426 of any one of SEQ ID NOs:4-29, 101-164, and 239-252 are not deleted or substituted.

59. (canceled)

60. (canceled)

61. The protein of claim 1, wherein the first Fc polypeptide and the second Fc polypeptide each contain one or more modifications that promote heterodimerization.

62. (canceled)

63. The protein of claim 61, wherein the first Fc polypeptide contains the T366S, L368A, and Y407V substitutions and the second Fc polypeptide contains the T366W substitution.

64. The protein of claim 61, wherein the first Fc polypeptide contains the T366W substitution and the second Fc polypeptide contains the T366S, L368A, and Y407V substitutions.

65. The protein of claim 1, wherein the first Fc polypeptide and/or the second Fc polypeptide comprises a native FcRn binding site.

66. The protein of claim 1, wherein the first Fc polypeptide and/or the second Fc polypeptide comprises a modification that alters FcRn binding.

67. The protein of claim 1, wherein the first Fc polypeptide and/or the second Fc polypeptide comprises one or more modifications that reduce effector function.

68. The protein of claim 67, wherein the modifications that reduce effector function are substitutions of Ala at position 234 and Ala at position 235, according to EU numbering.

69. The protein of claim 67, wherein both the first Fc polypeptide and the second Fc polypeptide comprise L234A and L235A substitutions.

70. The protein of claim 1, wherein the first Fc polypeptide and/or the second Fc polypeptide comprises modifications relative to the native Fc sequence that extend serum half-life.

71. (canceled)

72. The protein of claim 70, wherein the modifications comprise substitutions of Leu at position 428 and Ser at position 434 or (ii) a substitution of Ser or Ala at position 434, according to EU numbering.

73-76. (canceled)

77. The protein of claim 1, wherein the first Fc polypeptide and/or and the second Fc polypeptide comprises an amino acid sequence of any one of SEQ ID NOs:165-238, 253-370, and 377-388.

78. A pharmaceutical composition comprising the protein of claim 1 and a pharmaceutically acceptable carrier.

79. An isolated polynucleotide comprising a nucleotide sequence encoding the protein of claim 1.

80. A vector comprising the polynucleotide of claim 79.

81. A host cell comprising the polynucleotide of claim 79.

82. A method of treating a subject, the method comprising administering to the subject the protein of claim 1.

83-93. (canceled)

94. The protein of claim 67, wherein the modifications that reduce effector function are substitutions of Ala at position 234, Ala at position 235, and Gly at position 329, according to EU numbering.
